(19) United States
(12) Patent Application Publication
(10) Pub. No.: US 2023/0106836 A1
(43) Pub. Date: Apr. 6, 2023

(54) METHOD OF USING BIOSURFACTANT-PRODUCING BACTERIA AGAINST FUNGAL AND BACTERIAL PATHOGENS

(71) Applicant: THE ROYAL INSTITUTION FOR THE ADVANCEMENT OF LEARNING/MCGILL UNIVERSITY, Montreal (CA)

(72) Inventor: Suha JABAJI, Notre Dame de l'ile Perrot (CA)

(21) Appl. No.: 17/904,666

(22) PCT Filed: Feb. 19, 2021
(86) PCT No.: PCT/CA2021/050194

§ 371 Date: Aug. 19, 2022

Related U.S. Application Data
(60) Provisional application No. 62/979,570, filed on Feb. 21, 2020.

(51) Int. Cl. A01N 63/22; C12N 1/20; A01N 63/28; A01N 63/27; A01N 63/20; A01N 63/50; A01P 1/00; A23B 7/155; A23B 7/16

(52) U.S. Cl. CPC A01N 63/22; C12N 1/205; A01N 63/28; A01N 63/27; A01N 63/20; A01N 63/50; A01P 1/00; A23B 7/155; A23B 7/16; C12R 2001/07

(57) ABSTRACT

The disclosure provides a method of using a bacterium that is a Bacillus, Streptomyces, Microbacterium, Micrococcus, Rhodococcus, Pseudomonas, Arthrobacter or Staphylococcus and/or a biosurfactant-containing extract isolated from said bacterium, as an antimicrobial agent against a foodborne or a plant bacterial or fungal pathogen, wherein the bacterium optionally comprises at least 3 of bacilysin, difficidin, macrolactin h, bacillaene, bacillomycin d, fengycin, surfactin and bacillibactin. The disclosure also provides a plant or plant part bacterized or coated with a Bacillus or a biosurfactant-containing extract isolated from the Bacillus and a method of protecting a plant or plant part against a bacterial or fungal pathogen comprising bacterizing or coating the plant or plant part with a Bacillus or a biosurfactant-containing extract isolated from the Bacillus, wherein the Bacillus produces or the extract contains at least 3 of bacilysin, difficidin, macrolactin h, bacillaene, bacillomycin d, fengycin, surfactin and bacillibactin.

### CROSS REFERENCE TO RELATED APPLICATIONS

[0001] This application is a PCT application filed on Feb. 22, 2021 and published in English under PCT Article 21(2), which itself claims benefit of U.S. provisional application Ser. No. 62/979,570, filed on Feb. 21, 2021. All documents above are incorporated herein in their entirety by reference.

### STATEMENT REGARDING FEDERALLY SPONSORED RESEARCH OR DEVELOPMENT

[0002] N.A.

### FIELD OF THE DISCLOSURE

[0003] The present disclosure relates to method of using biosurfactant-producing bacteria against bacterial and fungal pathogens. More specifically, the present disclosure is concerned with biosurfactant-producing actinobacteria, proteobacteria and firmicutes and their use against foodborne and plant bacterial and fungal pathogens.

### REFERENCE TO SEQUENCE LISTING

[0004] Pursuant to 37 C.F.R. 1.821(c), a sequence listing is submitted herewith as an ASCII compliant text file named Sequence Listing 11168-00483_ST25, that was created on Feb. 18, 2021 and having a size of 1009 kilobytes. The content of the aforementioned file named Sequence Listing 11168-00483_ST25 is hereby incorporated by reference in its entirety.

### BACKGROUND OF THE DISCLOSURE

[0005] A number of studies have demonstrated the ability of human pathogenic bacteria to colonize not only the surface of the host plant, but also the interior; thereby raising concerns of contracting foodborne illness from vegetables (Fletcher et al., 2013). Recently reported outbreaks of E. coli O157:H7 on fresh lettuce and spinach and Salmonellosis from hot peppers underscore these concerns (Fletcher et al., 2013). High numbers of Salmonella enterica Newport SL1 have also been noted to adhere to alfalfa sprouts, which was directly related to the ability to produce aggregate curli fimbriae (Barak et al., 2002).

[0006] Some of the leading causes of foodborne illness are Salmonella and E. coli O157:H7 (Lynch et al., 2009). The Salmonellosis and E. coli O157:H7 outbreaks associated with fresh produce have been attributed most frequently to consumption of tomatoes, cantaloupes and leafy greens (Murray et al., 2017). Edible plants that become contaminated during agricultural practices can transmit the pathogen to consumers leading possibly to Salmonellosis outbreaks (Snyder et al., 2019). Mounting evidence indicates that foodborne pathogens not only contaminate plant surfaces but are also able to internalize into the tissues of fresh produce during the growing and the distribution processes (Deering et al., 2012). Thus, reducing Salmonella enterica association with plants during crop production could reduce risks of fresh produce-borne Salmonellosis.

[0007] In addition to being a vector of foodborne disease, fresh vegetables are of economic concern with respect to pathogens that directly result in destruction of the plant and its resultant yield. One of the most devastating diseases of lettuce is bacterial leaf spot (BLS) disease, caused by Xanthomonas campestris. Water soaked lesions appear on the margins of the leaves, reducing the quality and affecting the market value of lettuce (Nicolas et al., 2018). In Quebec, severe outbreaks of BLS can lead to devastating economic losses (i.e., 100% of the lettuce in the field is ruined).

[0008] There is a need for additional agents against human/plant pathogens.

[0009] The present description refers to a number of documents, the content of which is herein incorporated by reference in their entirety.

### SUMMARY OF THE DISCLOSURE

[0010] The present disclosure identified newly characterized microbes with prophylactic abilities against foodborne and plant pathogens. Foodborne bacteria, such as Salmonella strains, are known to exist in biofilms, which consist of the bacteria embedded in an extracellular matrix that enhances adherence and persistence to/on abiotic and biotic surfaces, including fresh produce and other surfaces along the food supply chain (Stepanović et al., 2004). The biofilm matrix is self-produced by the embedded bacteria and consists predominantly of a mixture of protein, carbohydrate and nucleic acid material. For example, many Salmonella and E. coli strains can produce the adhesin curli fimbriae, and the exopolysaccharide, cellulose, that are involved in surface adhesion, cell aggregation and persistence of these bacteria in various environments (Zogaj et al., 2001). Loss or disruption of any of these components leads to distinct colony morphotypes and decreased persistence/survival outside human hosts or on plants, such as fruits and vegetables (Milanov et al., 2015).

[0011] The present disclosure characterizes bacterial strains isolated from crude-oil (petroleum) samples and demonstrated their biosurfactant-producing potential using multiple screening methods.

[0012] Biosurfactants are surface-active compounds with emulsifying activities. These compounds are described as amphiphilic, containing both hydrophilic and hydrophobic ends, that allows them to interact at the interface between aqueous and non-aqueous systems (Marchant et al., 2012). There are six classes of biosurfactants: glycolipids, lipopeptides or lipoproteins, neutral lipids, phospholipids, substituted fatty acids and lipopolysaccharides. The class of biosurfactant that the genus Bacillus produces is lipopeptides (Zhao et al., 2017). Microbial biosurfactants have advantages (e.g., low toxicity to the environment, eco-friendly, biodegradability and acceptability) over their synthetic counterparts that makes them amenable for application in the fields of agriculture, the food industry and therapeutics (Mani et al., 2016; Nitschke et al., 2007; Sachdev et al., 2013).

[0013] More particularly, 123 bacterial strains were isolated from three oil batteries in the region of Chauvin, Alberta, and characterized by 16S rRNA gene sequencing. Based on their nucleotide sequences, the strains are associated with 3 phyla (Actinobacteria, Proteobacteria and Firmicutes), as well as 17 other discrete genera that shared high homology with known sequences, with the majority of these strains identified to the species level. The most prevalent strains associated with the three oil wells belonged to the Bacillus genus. Thirty-four of the 123 strains were identified as biosurfactant-producers, among which a specific Bacillus methylotrophicus strain OB9 exhibited the highest biosurfactant activity based on multiple screening methods and a comparative analysis with the commercially available biosurfactant, Tween™ 20.

[0014] The present disclosure shows the antimicrobial activity of B. velezensis (previously called methylotrophicus) OB9(or partially purified biosurfactant fractions thereof) in agar-diffusion assays against a panel of control Salmonella enterica Typhimurium strains displaying various biofilm expression morphotypes (UMR1, MAE14, MAE299 and MAE775); thereby indicating that the antagonistic activities of B. methylotrophicus OB9 are not circumvented by the biofilm barrier. Furthermore, the antagonistic capability of B. methylotrophicus OB9 was also noted against 17 other Salmonella serovars, including top clinical serovars Typhimurium Heidelberg, Newport, Infantis, Thompson and Braenderup, as well as environmental isolates. The activity of B. methylotrophicus OB9 also proved effective on a broader scale, where it affected 4 strains of E. coli, with the highest activity against E. coli E10-6, and a virulent strain of X. campestris, the causal agent of bacterial leaf spot on lettuce. B. methylotrophicus OB9 was antagonistic against the growth of fungal varieties as well, especially R. solani. The present disclosure demonstrates the inhibition spectrum of B. methylotrophicus OB9 against both human and plant pathogens; thereby making this bacterium attractive for agricultural and food safety applications in a climate where microbial-biofilm persistence is an increasing problem.

### General Definitions

[0015] Headings, and other identifiers, e.g., (a), (b), (i), (ii), etc., are presented merely for ease of reading the specification and claims. The use of headings or other identifiers in the specification or claims does not necessarily require the steps or elements be performed in alphabetical or numerical order or the order in which they are presented.

[0016] In the present description, a number of terms are extensively utilized. In order to provide a clear and consistent understanding of the specification and claims, including the scope to be given such terms, the following definitions are provided.

[0017] The use of the word “a” or “an” when used in conjunction with the term “comprising” in the claims and/or the specification may mean “one” but it is also consistent with the meaning of “one or more”, “at least one”, and “one or more than one”. Throughout this specification, unless the context requires otherwise, the words “comprise,” “comprises” and “comprising” will be understood to imply the inclusion of a stated step or element or group of steps or elements but not the exclusion of any other step or element or group of steps or elements.

[0018] Throughout this application, the term “about” is used to indicate that a value includes the standard deviation of error for the device or method being employed to determine the value. In general, the terminology “about” is meant to designate a possible variation of up to 10%. Therefore, a variation of 1, 2, 3, 4, 5, 6, 7, 8, 9 and 10% of a value is included in the term “about”. Unless indicated otherwise, use of the term “about” before a range applies to both ends of the range.

[0019] As used in this specification and claim(s), the words “comprising” (and any form of comprising, such as “comprise” and “comprises”), “having” (and any form of having, such as “have” and “has”), “including” (and any form of including, such as “includes” and “include”) or “containing” (and any form of containing, such as “contains” and “contain”) are inclusive or open-ended and do not exclude additional, un-recited elements or method steps.

[0020] As used herein, the term “consists of” or “consisting of” means including only the elements, steps, or ingredients specifically recited in the particular claimed embodiment or claim.

[0021] Terms and symbols of genetics, molecular biology, biochemistry and nucleic acid used herein follow those of standard treatises and texts in the field, e.g. Kornberg and Baker, DNA Replication, Second Edition (W. H. Freeman, New York, 1992); Lehninger, Biochemistry, Second Edition (Worth Publishers, New York, 1975); Strachan and Read, Human Molecular Genetics, Second Edition (Wiley-Liss, New York, 1999); Eckstein, editor, Oligonucleotides and Analogs: A Practical Approach (Oxford University Press, New York, 1991); Gait, editor, Oligonucleotide Synthesis: A Practical Approach (IRL Press, Oxford, 1984); and the like. All terms are to be understood with their typical meanings established in the relevant art.

### Bacterial Strains

[0022] The present disclosure encompasses the use of biosurfactant-producing bacterial strains as disclosed herein. In particular, it encompasses the use of bacterial strains that produce at least one of (at least 2, 3, 4, 5, 6, 7 or all 8 of) bacilysin, difficidin, macrolactin H, bacillaene, bacillomycin D, fengycin, surfactin and bacillibactin. In specific embodiments, it encompasses the use of bacterial strains isolated from oil (i.e., from crude oil/unrefined petroleum or oil-dwelling bacteria), and more particularly from the aqueous phase of a water extract of such oil. In specific embodiments, it encompasses bacterial strains (e.g., Bacillus such as Bacillus velezensis) encoding at least one of (at least 5, 10, 15, 20, 25, 30, 35, 40, 45, 50, 55, 60, 65, 70, 75, 80, 85, 90, 95, 100, 105, 110, 111 or more of) the following polypeptides and enzymes: MFS transporter; 1 biosynthesis protein BacA; cupin domain-containing protein; dihydroanticapsin 7-dehydrogenase; ATP-grasp domain-containing protein; MFS transporter; pyridoxal phosphate-dependent aminotransferase; ACP S-malonyltransferase; D-fructose-6-phosphate amidotransferase; acyl carrier protein; long-chain fatty acid--CoA ligase; SDR family oxidoreductase; SDR family NAD(P)-dependent oxidoreductase; type I polyketide synthase; KR domain-containing protein; SDR family NAD(P)-dependent oxidoreductase; SDR family NAD(P)-dependent oxidoreductase; SDR family NAD(P)-dependent oxidoreductase; SDR family NAD(P)-dependent oxidoreductase; SDR family NAD(P)-dependent oxidoreductase; zinc-binding dehydrogenase; cytochrome P450; hydroxymethylglutaryl-CoA synthase family protein; polyketide biosynthesis enoyl-CoA isomerase; ACP S-malonyltransferase; SDR family NAD(P)-dependent oxidoreductase; SDR family NAD(P)-dependent oxidoreductase; SDR family NAD(P)-dependent oxidoreductase; SDR family NAD(P)-dependent oxidoreductase; SDR family NAD(P)-dependent oxidoreductase; SDR family NAD(P)-dependent oxidoreductase; alpha/beta fold hydrolase; serine hydrolase; pyruvate dehydrogenase (acetyl-transferring) E1 component subunit alpha; MBL fold metallo-hydrolase; ACP S-malonyltransferase; acyltransferase domain-containing protein; ACP S-malonyltransferase; acyl carrier protein; hydroxymethylglutaryl-CoA synthase family protein; enoyl-CoA hydratase/isomerase; enoyl-CoA hydratase; non-ribosomal peptide synthetase; SDR family NAD(P)-dependent oxidoreductase; SDR family NAD(P)-dependent oxidoreductase; non-ribosomal peptide synthetase; methyltransferase; cytochrome P450; GntP family permease; CoA transferase subunit A; CoA transferase subunit B; 3-hydroxybutyrate dehydrogenase; ACP S-malonyltransferase; non-ribosomal peptide synthetase; non-ribosomal peptide synthetase; non-ribosomal peptide synthetase; carbohydrate-binding protein; glucuronoxylanase; D-alanyl-D-alanine carboxypeptidase/D-alanyl-D-alanine-endopeptidase; non-ribosomal peptide synthetase; amino acid adenylation domain-containing protein; amino acid adenylation domain-containing protein; non-ribosomal peptide synthetase; AMP-binding protein; amino acid adenylation domain-containing protein; non-ribosomal peptide synthase; DUF1360 domain-containing protein; family 10 glycosylhydrolase; acyl-CoA dehydrogenase; AMP-binding protein; acetyl-CoA carboxylase biotin carboxylase subunit; acetyl-CoA carboxylase biotin carboxyl carrier protein subunit; hydroxymethylglutaryl-CoA lyase; enoyl-CoA hydratase; acyl-CoA carboxylase subunit beta; GTP-binding protein; glutathione-dependent formaldehyde dehydrogenase; RDD family protein; YckD family protein; family 1 glycosylhydrolase; inhibitor of the DNA degrading activity of NucA (competence); DNA-entry nuclease; 6-phospho-3-hexuloisomerase; 3-hexulose-6-phosphate synthase; winged helix-turn-helix transcriptional regulator; 7 non-ribosomal peptide synthetase SrfAA; 7 non-ribosomal peptide synthetase SrfAB; AMP-binding protein; 7 non-ribosomal peptide synthetase SrfAC; 7 biosynthesis thioesterase SrfAD; aminotransferase class I/II-fold pyridoxal phosphate-dependent enzyme; YcxB family protein; DMT family transporter; PLP-dependent aminotransferase family protein; 4′-phosphopantetheinyl transferase superfamily protein; YitT family protein; cystine ABC transporter ATP-binding protein TcyC; amino acid ABC transporter permease; leucyl aminopeptidase; TRAP transporter large permease subunit; biotin transporter BioY; sulfite oxidase-like oxidoreductase; alpha/beta hydrolase; 2,3-dihydro-2,3-dihydroxybenzoate dehydrogenase; isochorismate synthase DhbC; (2,3-dihydroxybenzoyl)adenylate synthase; isochorismatase; non-ribosomal peptide synthetase; MbtH family protein; YukJ family protein; alanine dehydrogenase. In more specific embodiments, it encompasses bacterial strains that encode the gene products that participate in the synthesis of at least one of (at least 2, 3, 4, 5, 6,7 or all 8 of) bacilysin, difficidin, macrolactin H, bacillaene, bacillomycin D, fengycin, surfactin and bacillibactin. Without being so limited, such gene products are listed in Table I below. In more specific embodiments, it encompasses bacterial strains that encode at least one protein having an amino acid sequence as set forth in any one of SEQ ID NOs: 1-111. Without being so limited, the biosurfactant-producing bacterial strain is a Bacillus, Streptomyces, Microbacterium, Micrococcus, Rhodococcus, Pseudomonas, Arthrobacteror Staphylococcus (e.g., that is isolated from crude oil/oil dwelling bacterial strain). Without being so limited, the biosurfactant-producing bacterial strain is of one of the species listed in Table IV below. Without being so limited, the biosurfactant-producing bacterial strain is a Bacillus velezensis or a Bacillus amyloliquefaciens. Without being so limited, the biosurfactant-producing bacterial strain is a Bacillus velezensis (e.g., that is isolated from crude oil/oil dwelling bacterial strain).

[0023] As used herein, the term “biosurfactant-containing extract” refers to an extract of a bacterium (or bacteria) as disclosed herein comprising at least one biosurfactant. The extract is a whole extract or a fraction thereof which is obtained through any process known in the art for extracting biosurfactant from a bacterium or bacteria. Another commonly used process comprises using chloroform: methanol v:v (2:1) as the extraction solvent, followed by ethyl acetate and methanol. Without being so limited it includes supernatant of bacterial cell medium and acid fractions thereof such as but not limited to acid precipitate fraction.

### Forms of the Bacteria of the Present Invention

[0024] Although the bacteria (e.g., Bacillus such as Bacillus velezensis) of the present invention is an effective antibiotic against foodborne, fecal and environment human and plant pathogens when used alone (i.e. as a biologically pure strain), it may nevertheless also be used in combination with other bacteria (e.g., biosurfactant-producing or other). The present invention encompasses the use of the Bacillus methylotrophicus of the present invention as sole antibiotic bacteria or in combination with one or more other useful bacteria.

[0025] As used herein, the terminology “biologically pure” strain is intended to mean a strain separated from materials with which it is normally associated in nature. Note that a strain associated with compounds or materials that it is not normally found with in nature, is still defined as “biologically pure”. A monoculture of a particular strain is, of course, “biologically pure.”

[0026] For the methods and uses of the present invention, it is not necessary that the whole broth culture of the strains of the invention be used. Indeed, the present invention encompasses the use of a whole broth culture of a strain of the present invention, endospores produced by such strain, dried biomass of the strains and lyophilized strains. As used herein therefore, the terminology application of the “bacterium” of the present invention refers to application of any form or part of the strain of the present invention or a combination thereof that possesses the desired ability to induce drought tolerance.

[0027] The bacterium (e.g., Bacillus such as Bacillus velezensis) of the present invention (e.g., OB9) can take the form of a bacterium (such as whole broth culture of a strain of the present invention, endospores produced by such strain, dried biomass of the strains and lyophilized strains), a seed of a second or subsequent (up to fourth but preferably second) generation infected with the bacterium (e.g., Bacillus such as Bacillus velezensis), or a composition comprising the bacterium (e.g., Bacillus such as Bacillus velezensis). The bacterium (e.g., Bacillus such as Bacillus velezensis) of the present invention (e.g., OB9), or a composition thereof may be applied to soil directly prior to seeding the plant or after planting the plant (as described e.g., at Example 1), sprayed (e.g., whole broth culture) on the plant, soil and/or on the seed of the plant. Said seed may be applied to soil directly.

[0028] There is also provided a combination of an inoculum of a strain according to the present invention and of one or more carriers to form a composition. Formulating the bacterium (e.g., Bacillus such as Bacillus velezensis) in a composition may increase its potential storage time and stability.

[0029] In order to achieve good dispersion, adhesion and conservation/stability of compositions within the present invention, it may be advantageous to formulate the bacterium (e.g., Bacillus such as Bacillus velezensis) (such as whole broth culture of a strain of the present invention, endospores produced by such strain, dried biomass of the strains and lyophilized strains) with components that aid dispersion, adhesion and conservation/stability of the plant on which it is applied. It could be formulated as a spray, granules or as a coating for the plant seed. These components are referred to herein individually or collectively as “carrier”. Suitable formulations for this carrier will be known to those skilled in the art (wettable powders, granules and the like, or carriers within which the inoculum can be microencapsulated in a suitable medium and the like, liquids such as aqueous flowables and aqueous suspensions, and emulsifiable concentrates).

[0030] Peat-based inoculant represents a widely form of formulation, but it is not a sustainable solution as peat is a non-renewable material (Xavier, Holloway et al. 2004). Alternative methods such as the encapsulation of microorganism with biopolymer are encompassed has alternative formulation methods (Xavier, Holloway et al. 2004, John, Tyagi et al. 2011). Encapsulation is the process of making a protective capsule around the microorganism. The matrix of microsphere protects the cells by providing pre-defined and constant microenvironment thus allowing the cells to survive and maintain metabolic activity for extended period of time. Microsphere can provide a control release of microorganism as well as serve as energy source for the microorganism from its degradation. Different natural polysaccharides and protein co-extruded with calcium alginate in order to form a gelled matric, matrix material such as starches, maltodextrin, gum Arabic, pectin, chitosan, alginate and legumes protein are also encompassed by the present invention (Khan, Korber et al. 2013, Nesterenko, Alric et al. 2013). Without being so limited, useful carriers for the present invention include propylene glycol alginate, powder or granular inert materials may include plant growth media or matrices, such as rockwool and peat-based mixes, attapulgite clays, kaolinic clay, montmorillonites, saponites, mica, perlites, vermiculite, talc, carbonates, sulfates, oxides (silicon oxides), diatomites, phytoproducts, (ground grains, pulses flour, grain bran, wood pulp, and lignin), synthetic silicates (precipitated hydrated calcium silicates and silicon dioxides, organics), polysaccharides (gums, starches, seaweed extracts, alginates, plant extracts, microbial gums), and derivatives of polysaccharides, proteins, such as gelatin, casein, and synthetic polymers, such as polyvinyl alcohols, polyvinyl pyrrolidone, polyacrylates (Date and Roughley, 1977; Dairiki and Hashimoto, 2005; Jung et al., 1982). The carrier may include components such as chitosan, vermiculite, compost, talc, milk powder, gel, etc. Other suitable formulations will be known to those skilled in the art.

[0031] Without being so limited, endospores of the present invention can be incorporated in a seed coating where the material of seed coating could be as described above, e.g., biochar, peat moss, and other biopolymer carriers e.g., activated charcoal and lignosulfonate.

[0032] As used herein, the terminology “amount effective” or “effective amount” is meant to refer to an amount sufficient to effect beneficial or desired results. An effective amount can be provided in one or more administrations. In terms inducing antimicrobial activity against bacterial pathogen in plant, an “effective amount” of the microorganism of the present invention is an amount sufficient to effect antimicrobial activity in a plant as compared to that exhibited by plant in the absence of the microorganism. In a specific embodiment, it refers to an amount of about 1×10⁸ CFU or more/plant, plant part, or area around a plant or plant part.

### Plants

[0033] Plants benefiting from the bacterium (e.g., Bacillus such as Bacillus velezensis) of the present invention include any horticultural or agricultural plant. Without being so limited, it refers to any plant that can be commercialized including comestible plants.

[0034] In a specific embodiment, the plant is of the clade asterid. In a more specific embodiment, the asterid plant is of the solanales order. In another more specific embodiment, the solanales plant is of the solanaceae family (such as capsicum i.e. pepper). In another more specific embodiment, the solanales plant is of the Solanum genus (such as tomato, potato, eggplant, illustrated herein with tomato).

[0035] In another more specific embodiment, the asterid plant is of the asterales order. In another more specific embodiment, the asterales plant is of the Asteraceae family. In another more specific embodiment, the Asteraceae plant is of the cichorieae tribe. In another more specific embodiment, the cichorieae plant is of the Lactuca genus (illustrated herein with lettuce)

[0036] As used herein, the term “plant part” refers to any plant part removed from a growing or grown plant (in soil or other growing media, such as hydroponic, aquaponic, etc.). Without being so limited, it refers to any plant part that can be commercialized including comestible plant parts such as fruits and vegetables, shoots, leaves, stems, flowers, seeds and roots.

### Application

[0037] As indicated above, the methods of the present invention comprise applying the bacterium (e.g., Bacillus such as Bacillus velezensis) or a composition thereof (i) to the plant or to a part of the plant; and/or (ii) to an area around the plant or plant part. The treated seeds can be planted thereafter and grown into a plant that exhibits the ability to resist to bacterial infection. As used herein the terms “area around the plant or plant part” refers to the soil or plant pot prior to planting the plant seedling or seed, or during or after having planted the plant seedling or seed.

[0038] As used herein the term “coating” in the context of coating a plant or plant part with a bacterium, bacteria or biosurfactant-containing extract isolated from the bacterium or bacteria refers to applying on the surface of the plant or plant part or plant growth media.

[0039] As used herein the term “bacterizing” refers to any techniques used to enable the colonization of a plant by the bacterium. For this the bacterium (in a culture media or otherwise) can be applied on a seed or a seedling. Without being so limited, it includes applying the bacterium on the growth media (e.g., soil, water) close to the roots of the plant's seedling to enable the colonization of the plant by the bacterium.

TABLE I
Gene description and gene products of Bacillus velezensis OB9

| | | | NCBI PGAP | CONTIG | | | |
|---|---|---|---|---|---|---|---|
| | | MIBIG BGC GENE | ANNOTATED | ID^{B} | FROM | TO | SEQ |
| ^{a} | LOCUS TAG | NAME/DESCRIPTION | PRODUCT FUNCTION | # | (BP) | (BP) | NO: |
| 1 | AC810_RS02580 | YwfA | MFS transporter | 1 | 517903 | 525201 | 1. |
| 1 | AC810_RS02575 | BacA | 1 biosynthesis protein | 1 | 523187 | 523801 | 2. |
| | | | BacA | | | | |
| 1 | AC810_RS02570 | BacB | cupin domain-containing | 1 | 522487 | 523197 | 3. |
| | | | protein | | | | |
| 1 | AC810_RS02565 | BacC | dihydroanticapsin 7- | 1 | 521729 | 522490 | 4. |
| | | | dehydrogenase | | | | |
| 1 | AC810_RS02560 | BacD | ATP-grasp domain- | 1 | 520293 | 521711 | 5. |
| | | | containing protein | | | | |
| 1 | AC810_RS02555 | BacE | MFS transporter | 1 | 519115 | 520296 | 6. |
| 1 | AC810_RS02550 | YwfG | pyridoxal phosphate- | 1 | 517903 | 519102 | 7. |
| | | | dependent | | | | |
| | | | aminotransferase | | | | |
| 2 | AC810_RS06775 | malonyl CoA-acyl | ACP S- | 2 | 562177 | 564435 | 8. |
| | | carrier protein | malonyltransferase | | | | |
| | | transacylase | | | | | |
| 2 | AC810_RS06780 | putative long-chain | D-fructose-6-phosphate | 2 | 564476 | 565456 | 9. |
| | | fatty_acid CoA ligase | amidotransferase | | | | |
| 2 | AC810_RS06785 | probable acyl carrier | acyl carrier protein | 2 | 565481 | 565753 | 10. |
| | | protein | | | | | |
| 2 | AC810_RS06790 | acyl CoA synthetase | long-chain fatty acid- | 2 | 565750 | 567114 | 11. |
| | | (AMP forming)/AMP | CoA ligase | | | | |
| | | acid ligase II | | | | | |
| 2 | AC810_RS06795 | 3-oxoacyl-(acyl carrier | SDR family | 2 | 567129 | 567866 | 12. |
| | | protein) reductase | oxidoreductase | | | | |
| 2 | AC810_RS06800 | polyketide synthase | SDR family NAD(P)- | 2 | 567906 | 577193 | 13. |
| | | type I | dependent | | | | |
| | | | oxidoreductase | | | | |
| 2 | AC810_RS18325 | polyketide synthase | type I polyketide | 15 | 2 | 982 | 14. |
| | | type I | synthase | | | | |
| 2 | AC810_RS18330 | polyketide synthase | KR domain-containing | 15 | 1001 | 7297 | 15. |
| | | type I | protein | | | | |
| 2 | AC810_RS18335 | polyketide synthase | SDR family NAD(P)- | 15 | 7337 | 13063 | 16. |
| | | type I | dependent | | | | |
| | | | oxidoreductase | | | | |
| 2 | AC810_RS18340 | polyketide synthase | SDR family NAD(P)- | 15 | 13115 | 24961 | 17. |
| | | type I | dependent | | | | |
| | | | oxidoreductase | | | | |
| 2 | AC810_RS10990 | polyketide synthase | SDR family NAD(P)- | 5 | 2 | 6358 | 18. |
| | | type I | dependent | | | | |
| | | | oxidoreductase | | | | |
| 2 | AC810_RS10995 | polyketide synthase | SDR family NAD(P)- | 5 | 6363 | 14081 | 19. |
| | | type I | dependent | | | | |
| | | | oxidoreductase | | | | |
| 2 | AC810_RS11000 | polyketide synthase | SDR family NAD(P)- | 5 | 14104 | 20256 | 20. |
| | | type I | dependent | | | | |
| | | | oxidoreductase | | | | |
| 2 | AC810_RS11005 | polyketide synthase | zinc-binding | 5 | 20253 | 26468 | 21. |
| | | type I | dehydrogenase | | | | |
| 2 | AC810_RS11010 | putative cytochrome | cytochrome P450 | 5 | 26550 | 27704 | 22. |
| | | P450 monooxygenase | | | | | |
| 2 | AC810_RS11015 | 3-hydroxy-3- | hydroxymethylglutaryl- | 5 | 27762 | 29009 | 23. |
| | | methylglutaryl | CoA synthase family | | | | |
| | | coenzyme A synthase- | protein | | | | |
| | | like | | | | | |
| 2 | AC810_RS11020 | Enoyl-CoA hydratase | polyketide biosynthesis | 5 | 29069 | 29815 | 24. |
| | | | enoyl-CoA isomerase | | | | |
| 3 | AC810_RS08985 | malonyl CoA [acyl- | ACP S- | 3 | 411925 | 414231 | 25. |
| | | carrier-protein] | malonyltransferase | | | | |
| | | transacylase | | | | | |
| 3 | AC810_RS08990 | polyketide synthase | SDR family NAD(P)- | 3 | 414253 | 426507 | 26. |
| | | type I | dependent | | | | |
| | | | oxidoreductase | | | | |
| 3 | AC810_RS08995 | polyketide synthase | SDR family NAD(P)- | 3 | 426507 | 431279 | 27. |
| | | type I | dependent | | | | |
| | | | oxidoreductase | | | | |
| 3 | AC810_RS09000 | polyketide synthase | SDR family NAD(P)- | 3 | 431327 | 440035 | 28. |
| | | type I | dependent | | | | |
| | | | oxidoreductase | | | | |
| 3 | AC810_RS09005 | polyketide synthase | SDR family NAD(P)- | 3 | 440028 | 447032 | 29. |
| | | type I | dependent | | | | |
| | | | oxidoreductase | | | | |
| 3 | AC810_RS09010 | polyketide synthase | SDR family NAD(P)- | 3 | 447056 | 452767 | 30. |
| | | type I | dependent | | | | |
| | | | oxidoreductase | | | | |
| 3 | AC810_RS09015 | polyketide synthase | SDR family NAD(P)- | 3 | 452767 | 460149 | 31. |
| | | type I | dependent | | | | |
| | | | oxidoreductase | | | | |
| 3 | AC810_RS09020 | polyketide synthase | alpha/beta fold | 3 | 460200 | 464051 | 32. |
| | | type I | hydrolase | | | | |
| 3 | AC810_RS09025 | pbp related beta- | serine hydrolase | 3 | 464084 | 465175 | 33. |
| | | lactamase precursor | | | | | |
| 3 | AC810_RS09030 | pyruvate | pyruvate dehydrogenase | 3 | 465645 | 466760 | 34. |
| | | dehydrogenase (E1 | (acetyl-transferring) E1 | | | | |
| | | alpha subunit) | component subunit | | | | |
| | | | alpha | | | | |
| 4 | AC810_RS10270 | hydroxyacylglutathione | MBL fold metallo- | 4 | 221117 | 221794 | 35. |
| | | hydrolase | hydrolase | | | | |
| 4 | AC810_RS10275 | malonyl CoA [acyl- | ACP S- | 4 | 222109 | 222978 | 36. |
| | | carrier-protein] | malonyltransferase | | | | |
| | | transacylase [AT] | | | | | |
| 4 | AC810_RS10280 | malonyl CoA [acyl- | acyltransferase domain- | 4 | 223115 | 224089 | 37. |
| | | carrier-protein] | containing protein | | | | |
| | | transacylase [AT] | | | | | |
| 4 | AC810_RS10285 | malonyl-CoA-[acyl- | ACP S- | 4 | 224091 | 226331 | 38. |
| | | carrier_protein] | malonyltransferase | | | | |
| | | transacylase | | | | | |
| | | [AT]/oxidoreductase | | | | | |
| | | [OR] | | | | | |
| 4 | AC810_RS10290 | acyl carrier protein | acyl carrier protein | 4 | 226397 | 226645 | 39. |
| 4 | AC810_RS10295 | 3-hydroxy-3- | hydroxymethylglutaryl- | 4 | 226697 | 226697 | 40. |
| | | methylglutaryl CoA | CoA synthase family | | | | |
| | | synthase | protein | | | | |
| 4 | AC810_RS10300 | polyketide | enoyl-CoA | 4 | 227956 | 228729 | 41. |
| | | biosynthesis enoyl- | hydratase/isomerase | | | | |
| | | CoA hydratase | | | | | |
| 4 | AC810_RS10305 | polyketide | enoyl-CoA hydratase | 4 | 228739 | 229488 | 42. |
| | | biosynthesis enoyl- | | | | | |
| | | CoA hydratase | | | | | |
| 4 | AC810_RS10310 | hybrid NRPS/PKS | non-ribosomal peptide | 4 | 229528 | 244482 | 43. |
| | | protein | synthetase | | | | |
| 4 | AC810_RS10315 | polyketide synthase of | SDR family NAD(P)- | 4 | 244484 | 257902 | 44. |
| | | type I | dependent | | | | |
| | | | oxidoreductase | | | | |
| 4 | AC810_RS10320 | polyketide synthase of | SDR family NAD(P)- | 4 | 257920 | 268455 | 45. |
| | | type I | dependent | | | | |
| | | | oxidoreductase | | | | |
| 4 | AC810_RS10325 | hybrid NRPS/PKS | non-ribosomal peptide | 4 | 268445 | 284746 | 46. |
| | | protein | synthetase | | | | |
| 4 | AC810_RS10330 | polyketide synthase of | methyltransferase | 4 | 284760 | 292217 | 47. |
| | | type I | | | | | |
| 4 | AC810_RS10335 | cytochrome P450 | cytochrome P450 | 4 | 292355 | 293566 | 48. |
| | | ‘oxidase’ | | | | | |
| 5 | AC810_RS10885 | YxjC | GntP family permease | 4 | 432329 | 433774 | 49. |
| 5 | AC810_RS10880 | ScoA | CoA transferase subunit | 4 | 431603 | 432304 | 50. |
| | | | A | | | | |
| 5 | AC810_RS10875 | ScoB | CoA transferase subunit | 4 | 430923 | 431585 | 51. |
| | | | B | | | | |
| 5 | AC810_RS10870 | YxjF | 3-hydroxybutyrate | 4 | 430125 | 430910 | 52. |
| | | | dehydrogenase | | | | |
| 5 | AC810_RS10865 | malonyl-CoA | ACP S- | 4 | 428363 | 429565 | 53. |
| | | transacylase | malonyltransferase | | | | |
| 5 | AC810_RS10860 | 5 synthetase A | non-ribosomal peptide | 4 | 416395 | 428343 | 54. |
| | | | synthetase | | | | |
| 5 | AC810_RS10855 | 5 synthetase B | non-ribosomal peptide | 4 | 400226 | 416350 | 55. |
| | | | synthetase | | | | |
| 5 | AC810_RS10850 | 5 synthetase C | non-ribosomal peptide | 4 | 392283 | 400142 | 56. |
| | | | synthetase | | | | |
| 5 | AC810_RS10845 | XynD | carbohydrate-binding | 4 | 390574 | 392109 | 57. |
| | | | protein | | | | |
| 5 | AC810_RS10840 | YnfF | glucuronoxylanase | 4 | 389241 | 390512 | 58. |
| 6 | AC810_RS12615 | DacC | D-alanyl-D-alanine | 5 | 316516 | 317991 | 59. |
| | | | carboxypeptidase/D- | | | | |
| | | | alanyl-D-alanine- | | | | |
| | | | endopeptidase | | | | |
| 6 | AC810_RS12620 | 6 synthetase A | non-ribosomal peptide | 5 | 318471 | 326105 | 60. |
| | | | synthetase | | | | |
| 6 | AC810_RS12625 | 6 synthetase C or D | amino acid adenylation | 5 | 326131 | 332856 | 61. |
| | | | domain-containing | | | | |
| | | | protein | | | | |
| 6 | AC810_RS18585 | 6 synthetase A | amino acid adenylation | 18 | 9921 | 14477 | 62. |
| | | | domain-containing | | | | |
| | | | protein | | | | |
| 6 | AC810_RS18580 | 6 synthetase B | non-ribosomal peptide | 18 | 2198 | 9895 | 63. |
| | | | synthetase | | | | |
| 6 | AC810_RS18575 | 6 synthetase C | AMP-binding protein | 18 | 1 | 2182 | 64. |
| 6 | AC810_RS10985 | 6 synthetase D | amino acid adenylation | 4 | 456293 | 460588 | 65. |
| | | | domain-containing | | | | |
| | | | protein | | | | |
| 6 | AC810_RS10980 | 6 synthetase E | non-ribosomal peptide | 4 | 452471 | 456274 | 66. |
| | | | synthase | | | | |
| 6 | AC810_RS10975 | YngL | DUF1360 domain- | 4 | 452017 | 452397 | 67. |
| | | | containing protein | | | | |
| 6 | AC810_RS10970 | YngK | family 10 | 4 | 450357 | 451895 | 68. |
| | | | glycosylhydrolase | | | | |
| 6 | AC810_RS10965 | YngJ | acyl-CoA | 4 | 449074 | 450216 | 69. |
| | | | dehydrogenase | | | | |
| 6 | AC810_RS10960 | YngI | AMP-binding protein | 4 | 447389 | 449029 | 70. |
| 6 | AC810_RS10955 | YngH | acetyl-CoA carboxylase | 4 | 446018 | 447367 | 71. |
| | | | biotin carboxylase | | | | |
| | | | subunit | | | | |
| 6 | AC810_RS10950 | hypothetical protein | acetyl-CoA carboxylase | 4 | 445809 | 446021 | 72. |
| | | | biotin carboxyl carrier | | | | |
| | | | protein subunit | | | | |
| 6 | AC810_RS10945 | YngG | hydroxymethylglutaryl- | 4 | 444894 | 445793 | 73. |
| | | | CoA lyase | | | | |
| 6 | AC810_RS10940 | YngF | enoyl-CoA hydratase | 4 | 444101 | 444880 | 74. |
| 6 | AC810_RS10935 | YngE | acyl-CoA carboxylase | 4 | 442554 | 444083 | 75. |
| | | | subunit beta | | | | |
| 7 | AC810_RS13840 | YciC protein | GTP-binding protein | 7 | 26237 | 27439 | 76. |
| 7 | AC810_RS13835 | Yx01 protein | glutathione-dependent | 7 | 25036 | 26172 | 77. |
| | | | formaldehyde | | | | |
| | | | dehydrogenase | | | | |
| 7 | AC810_RS13830 | YckC protein | RDD family protein | 7 | 24587 | 25021 | 78. |
| 7 | AC810_RS13825 | YckD protein | YckD family protein | 7 | 24192 | 24515 | 79. |
| 7 | AC810_RS13820 | YckE protein | family 1 | 7 | 22652 | 24088 | 80. |
| | | | glycosylhydrolase | | | | |
| 7 | AC810_RS13815 | Nin | inhibitor of the DNA | 7 | 22213 | 22611 | 81. |
| | | | degrading activity of | | | | |
| | | | NucA (competence) | | | | |
| 7 | AC810_RS13810 | NucA | DNA-entry nuclease | 7 | 21755 | 22192 | 82. |
| 7 | AC810_RS13805 | HxlB protein | 6-phospho-3- | 7 | 20840 | 21397 | 83. |
| | | | hexuloisomerase | | | | |
| 7 | AC810_RS13800 | HxlA protein | 3-hexulose-6-phosphate | 7 | 20208 | 20843 | 84. |
| | | | synthase | | | | |
| 7 | AC810_RS13795 | transcriptional | winged helix-turn-helix | 7 | 19614 | 19976 | 85. |
| | | regulator | transcriptional regulator | | | | |
| 7 | AC810_RS13785 | 7 synthetase A | 7 non-ribosomal peptide | 7 | 8268 | 19022 | 86. |
| | | | synthetase SrfAA | | | | |
| 7 | AC810_RS13780 | 7 synthetase B | 7 non-ribosomal peptide | 7 | 1 | 8246 | 87. |
| | | | synthetase SrfAB | | | | |
| 7 | AC810_RS13775 | 7 synthetase B | AMP-binding protein | 6 | 212875 | 215343 | 88. |
| 7 | AC810_RS13770 | 7 synthetase C | 7 non-ribosomal peptide | 6 | 209004 | 212840 | 89. |
| | | | synthetase SrfAC | | | | |
| 7 | AC810_RS13765 | 7 synthetase D | 7 biosynthesis | 6 | 208253 | 208984 | 90. |
| | | | thioesterase SrfAD | | | | |
| 7 | AC810_RS13760 | amino transferase | aminotransferase class | 6 | 206821 | 208131 | 91. |
| | | | I/II-fold pyridoxal | | | | |
| | | | phosphate-dependent | | | | |
| | | | enzyme | | | | |
| 7 | AC810_RS13755 | Not in the defined | YcxB family protein | 6 | 206247 | 206786 | 92. |
| | | duster but in this | | | | | |
| | | region of OB9 | | | | | |
| 7 | AC810_RS13750 | transporter | DMT family transporter | 6 | 205288 | 206250 | 93. |
| 7 | AC810_RS13745 | transcriptional | PLP-dependent | 6 | 203859 | 205169 | 94. |
| | | regulator containing an | aminotransferase family | | | | |
| | | aminotransferase | protein | | | | |
| | | domain | | | | | |
| 7 | AC810_RS13740 | phosphopantetheinyl | 4′-phosphopantetheinyl | 6 | 203190 | 203864 | 95. |
| | | transferase involved in | transferase superfamily | | | | |
| | | nonribosomal | protein | | | | |
| | | synthesis | | | | | |
| 7 | AC810_RS13735 | integral membrane | YitT family protein | 6 | 202444 | 203091 | 96. |
| | | protein involved in | | | | | |
| | | nonribosomal | | | | | |
| | | synthesis | | | | | |
| 7 | AC810_RS13730 | YckI protein | cystine ABC transporter | 6 | 201619 | 202362 | 97. |
| | | | ATP-binding protein | | | | |
| | | | TcyC | | | | |
| 7 | AC810_RS13725 | YckJ protein | amino acid ABC | 6 | 200902 | 201606 | 98. |
| | | | transporter permease | | | | |
| 8 | AC810_RS14880 | cytosol | leucyl aminopeptidase | 8 | 54134 | 55624 | 99. |
| | | aminopeptidase | | | | | |
| 8 | AC810_RS14885 | histidine/basic amino | TRAP transporter large | 8 | 55757 | 57085 | 100. |
| | | acid transporter | permease subunit | | | | |
| 8 | AC810_RS14890 | putative biotin | biotin transporter BioY | 8 | 57132 | 57725 | 101. |
| | | transporter | | | | | |
| 8 | AC810_RS14895 | putative molybdopterin | sulfite oxidase-like | 8 | 57825 | 58421 | 102. |
| | | containing enzyme | oxidoreductase | | | | |
| | | subunit | | | | | |
| 8 | AC810_RS14900 | 8 trilactone hydrolase | alpha/beta hydrolase | 8 | 58597 | 59466 | 103. |
| 8 | AC810_RS14905 | DhbA | 2,3-dihydro-2,3- | 8 | 59602 | 60387 | 104. |
| | | | dihydroxybenzoate | | | | |
| | | | dehydrogenase | | | | |
| 8 | AC810_RS14910 | DhbC | isochorismate synthase | 8 | 60411 | 61607 | 105. |
| | | | DhbC | | | | |
| 8 | AC810_RS14915 | DhbE | (2,3- | 8 | 61626 | 63251 | 106. |
| | | | dihydroxybenzoyl)adenyl | | | | |
| | | | -ate synthase | | | | |
| 8 | AC810_RS14920 | DhbB | isochorismatase | 8 | 63269 | 64195 | 107. |
| 8 | AC810_RS14925 | DhbF | non-ribosomal peptide | 8 | 64210 | 71337 | 108. |
| | | | synthetase | | | | |
| 8 | AC810_RS14930 | stimulator of DhbF | MbtH family protein | 8 | 71356 | 71571 | 109. |
| | | tyrosine adenylation | | | | | |
| | | activity | | | | | |
| 8 | AC810_RS14935 | conserved protein of | YukJ family protein | 8 | 71616 | 72293 | 110. |
| | | unknown function | | | | | |
| 8 | AC810_RS14940 | L-alanine | alanine dehydrogenase | 8 | 72411 | 73541 | 111. |
| | | dehydrogenase (NAD- | | | | | |
| | | dependent) | | | | | |

^{a} 1 Baciyn; 2 Difficidin; 3 Macrolactin H; 4 Bacillaene; 5 Bacillomycin D; 6 Fengycin; 7 Surfactin; 8 Bacillibactin.
^{B}NZ_LGAU0100000.

[0040] More specifically, in accordance with the present disclosure, there is provided the following items:

[0041] Item 1. Method of using a bacterium that is a Bacillus, Streptomyces, Microbacterium, Micrococcus, Rhodococcus, Pseudomonas, Arthrobacter or Staphylococcus and/or a biosurfactant-containing extract isolated from said bacterium, as an antimicrobial agent against a foodborne or a plant bacterial or fungal pathogen.

[0042] Item 2.The method of item 1, wherein the bacterium is a Bacillus.

[0043] Item 3.The method of item 1, wherein the bacterium is a Bacillus velezensis or a Bacillus amyloliquefaciens.

[0044] Item 4.The method of item 1, wherein the bacterium produces, or the biosurfactant-containing extract contains, at least 3 of bacilysin, difficidin, macrolactin H, bacillaene, bacillomycin D, fengycin, surfactin and bacillibactin.

[0045] Item 5.The method of any one of items 1-4, wherein the bacterium encodes at least 10 of SEQ ID NOs: 1-111.

[0046] Item 6.The method of any one of items 1-5, wherein the bacterium is a Bacillus velezensis OB9.

[0047] Item 7.The method of any one of items 1-6, wherein the bacterial or fungal pathogen is a Salmonella, an Escherichia coli, an Enterobacteriaceae, an Xanthomonas campestris, a Rhizoctonia solani or a Botrytis cinereal.

[0048] Item 8.The method of any one of items 1-6, wherein the bacterial pathogen is a Salmonella or a Xanthomonas campestris.

[0049] Item 9.The method of any one of items 1-8, wherein the bacterial or fungal pathogen is a food and/or plant pathogen.

[0050] Item 10. The method of any one of items 1-8, wherein the bacterial or fungal pathogen is a plant pathogen, and wherein the method comprises bacterizing a plant or coating food or a plant with the bacterium.

[0051] Item 11. The method of item 10, wherein the plant is a tomato plant or a lettuce plant.

[0052] Item 12. The method of any one of items 1-11, wherein the bacterial pathogen is a biofilm producing bacterial pathogen.

[0053] Item 13. The method of item 12, wherein the biofilm producing bacterial pathogen is a Salmonella.

[0054] Item 14. The method of item 13, wherein the biofilm producing bacterial pathogen is a Salmonella enterica.

[0055] Item 15. The method of any one of items 1-14, wherein the method uses the biosurfactant-containing extract isolated from said bacterium.

[0056] Item 16. The method of item 15, wherein the method uses an acid precipitate fraction of the biosurfactant-containing extract.

[0057] Item 17. A plant or plant part bacterized or coated with a Bacillus or a biosurfactant-containing extract isolated from the Bacillus.

[0058] Item 18. The plant or plant part of item 17, wherein the Bacillus is a Bacillus velezensis.

[0059] Item 19. The plant or plant part of item 17 or 18, wherein the Bacillus produces, or the biosurfactant-containing extract contains at least 3 of bacilysin, difficidin, macrolactin H, bacillaene, bacillomycin D, fengycin, surfactin and bacillibactin.

[0060] Item 20. The plant or plant part of any one of items 17-19, wherein the Bacillus encodes at least 10 of SEQ ID NOs: 1-111.

[0061] Item 21. The plant or plant part of any one of items 17-20, wherein the Bacillus is Bacillus velezensis OB9.

[0062] Item 22. The plant or plant part of any one of items 17-21, which is a tomato or a lettuce plant, plant part or cell.

[0063] Item 23. A method of protecting a plant or plant part against a bacterial or fungal pathogen comprising bacterizing or coating the plant or plant part with a Bacillus or a biosurfactant-containing extract isolated from the Bacillus, wherein the Bacillus produces or the extract contains at least 3 of bacilysin, difficidin, macrolactin H, bacillaene, bacillomycin D, fengycin, surfactin and bacillibactin.

[0064] Item 24. The method of item 23, wherein the Bacillus is a Bacillus velezensis.

[0065] Item 25. The method of item 23 or 24, wherein the Bacillus encodes at least 10 of SEQ ID NOs: 1-111.

[0066] Item 26. The method of one of items 23-25, wherein the Bacillus is a Bacillus methylotrophicus OB9.

[0067] Item 27. The method of any one of items 23-26, wherein the method comprising bacterizing or coating the plant.

[0068] Item 28. The method of any one of items 23-26, wherein the method comprising bacterizing or coating the plant part.

[0069] Item 29. The method of any one of items 23-28, wherein the bacterial or fungal pathogen is a Salmonella, an Escherichia coli, an Enterobacteriaceae, an Xanthomonas campestris, a Rhizoctonia solani or a Botrytis cinereal.

[0070] Item 30. The method of any one of items 23-29, wherein the bacterial pathogen is a Salmonella or a Xanthomonas campestris.

[0071] Other objects, advantages and features of the present disclosure will become more apparent upon reading of the following non-restrictive description of specific embodiments thereof, given by way of example only with reference to the accompanying drawings.

### BRIEF DESCRIPTION OF THE DRAWINGS

[0072] In the appended drawings:

[0073] FIGS. 1A-C. Distribution of bacterial genera in three oil wells. The numbers in each pie chart represent the isolates of each genus. The numbers in brackets represent the abundance of bacterial isolates of each genus relative to the total number of isolates recovered from each oil well. (FIG. 1A) Well 10-22, (FIG. 1B) Well 5-27, and (FIG. 1C) Well 10-17. Data represent the average of three-replicate samples.

[0074] FIGS. 2A-B. The antimicrobial activities of B. methylotrophicus OB9 (B.m.OB9) against plant and foodborne pathogens. (FIG. 2A) Confrontation co-culture assay with the fungal plant pathogen, Rhizoctonia solani. (FIG. 2B) Agar diffusion assays with Xanthomonas campestris B07.007 (X. campestris), Salmonella enterica subsp. enterica Newport SL1 (S. enterica), Escherichia coli E14-6 (E. coli). The (−ve) series denotes confluent growth of each organism on the control plates, while in the (+ve) series (Diffusion Agar Assay) the same organisms were challenged with B. methylotrophicus OB9 (as noted by the zone of clearing around B. methylotrophicus OB9).

[0075] FIGS. 3A-C. Thin layer chromatography (TLC) separation and biosurfactant assessment of cell free supernatant (CFS) and acid precipitate fraction (APF) extracts from B. methylotrophicus OB9.(FIG. 3A) TLC plate exposed to UV light with fraction numbers and Rf values denoted for CFS and APF preparations. The biosurfactant properties of TLC-isolated APF fractions of B. methylotrophicus OB9 were analyzed by the drop collapse assay (FIG. 3B) with APF fractions 1-5 and Triton™ X-100 (T) as a control and the oil spreading assay (FIG. 3C) with APF fractions 1-5, water (W) and Triton™ TM X-100 (T).

[0076] FIGS. 4A-E. Antimicrobial assessment of APF extracts from B. methylotrophicus OB9. (FIG. 4A) Antimicrobial activity of APF fractions F3 and F5 with the agar diffusion assay against Salmonella Typhimurium producing four biofilm morphotypes. From left to right: column 1 contains negative controls (-ve) for growth of each of the four strains (rows 1-4 are UMR1, MAE14, MAE299 and MAE775, respectively); columns 2-4 contain the same strains, but assayed against fraction 3 (F3), fraction 5 (F5) or bleach as positive control (+ve), respectively. FIGS. 4B-D: Additional diffusion assays of F3, F5, 1% (v/v) acetic acid, and 1% lactic acid against Salmonella agona PARC #5 (designated S. enterica strain A) (FIG. 4B), Salmonella serovar I:Rough-O:e,h:e,n (designated S. enterica strain B) (FIG. 4C) and E. coli E14-6 (E. coli) (FIG. 4D). In FIGS. 4B-D, upper panels show fractions F3 and F5 with the noted bacteria and the lower panels show fractions F3 and F5 with the noted bacteria and acetic acid or lactic acid. FIG. 4E shows the antagonistic effect of F3 and F5 against Rhizoctonia solani (top two panels), while the bottom two panels display negative control growth (−) and APF fraction 5 (F5) assayed Botrytis cinerea. Antimicrobial assessment of APF was conducted three times.

[0077] FIGS. 5A-D. Suppression of Salmonella and Xanthomonas growth in co-cultures with B. methylotrophicus OB9. FIGS. 5A-B: Temporal microbial counts of Salmonella enterica Newport (SL1) (FIG. 5A) and Bacillus methylotrophicus (B.m. OB9) (FIG. 5B) in single cultures and in co-cultures with OB9 over 72 hours. FIGS. 5B-C: Temporal microbial counts of Xanthomonas (FIG. 5C) and OB9 (FIG. 5D) in single cultures and in co-cultures with B. methylotrophicus OB9 over 72 hours.

[0078] FIGS. 6A-D. Suppression of Salmonella enterica subsp. enterica Newport SL1 (S. enterica) and Xanthomonas campestris B07.007 (X. campestris) growth in bacterized plants with Bacillus methylotrophicus OB9 (B.m. OB9). (FIG. 6A) Control treatment (tomato+S. enterica subsp. enterica Newport SL1 (S. enterica)) displays a tomato seedling in tissue culture infected with S. enterica. Recovery of S. enterica cells on culture medium from a detached leaf (shown) infected with S. enterica representative of CFU/gram tissue is depicted on the agar plate. (FIG. 6B) Treatment (Tomato+B.m. OB9+S. enterica) consisting of a tomato seedling in tissue culture bacterized with Bacillus methylotrophicus OB9 (B.m. OB9) and infected with S. enterica. Recovery of B.m. OB9 cells from a detached bacterized leaf (shown) infected with S. enterica (B.m. OB9+S. enterica) representative of CFU/gram tissue is depicted on the agar plate. (FIG. 6C) Control treatment (Lettuce+X. campestris) showing a lettuce seedling in tissue culture infected with X. campestris B07.007 and an infected detached leaf is shown. Recovery of X. campestris cells on culture medium from a detached leave (shown) infected with X. campestris representative of CFU/gram tissue is depicted on the agar plate. (FIG. 6D) Treatment (Lettuce+B.m.OB9+X. campestris) of a lettuce seedling in tissue culture bacterized with B.m. OB9 and infected with X. campestris B07.007. Recovery of B.m. OB9 cells but not X. campestris cells on culture medium from a detached bacterized leave (shown) infected with X. campestris representative of CFU/gram tissue is depicted on the agar plate.

[0079] FIGS. 7A-D. Quantification of cell numbers of B. methylotrophicus OB9 (B.m. OB9), Salmonella enterica subsp. enterica Newport SL1 (S. enterica) and Xanthomonas campestris B07.007 (X. campestris) recovered from leaf tissues. Leaf tissues bacterized with B.m.OB9 and challenged with S. enterica (FIG. 7A) and X. campestris (FIG. 7B). FIGS. 7C-D: Tomato and lettuce leaf samples that were coated with B.m. OB9 and infected with S. enterica (FIG. 7C) and X. campestris (FIG. 7D). (BI) and (CI) samples represent B.m. OB9bacterized (BI) or coated (CI) tissues that are infected with either S. enterica or X. campestris. (NBI) and (NCI) treatments represent non-bacterized and non-coated plant samples that were infected with S. enterica or X. campestris controls, respectively. Data represent the average of 5 replicates per treatment.

### DESCRIPTION OF ILLUSTRATIVE EMBODIMENTS

[0080] The present disclosure is illustrated in further details by the following non-limiting examples.

### EXAMPLE 1: MATERIALS AND METHODS

### Source of Crude Oil Samples and Organisms

[0081] Crude oil samples were obtained from the operating area of Talisman Energy Inc., which is located in Chauvin, Alberta. The inventors were provided with duplicate samples representing pooled samples from wells of each of the three batteries (battery 10-22, battery 5-27 and battery 10-17), using sterile 500 mL Schott bottles tightly sealed, kept on ice during transportation and stored at 4° C. for DNA extraction (Table II, below). The physical and chemical characteristics of the crude oil are listed in Table II. Target organisms, consisting of a panel of 41 bacterial and fungal strains (listed in Table III, below), were tested in dual diffusion assays with biosurfactant-producing strains. Salmonella enterica subsp. Enterica strains belonging to 17 different serovars, including top clinical serovars (e.g., Typhimurium, Heidelberg, Newport, Infantis, Thompson and Braenderup) and environmental samples, were classified according to the four Salmonella biofilm morphotypes displayed on congo red plates (Römling et al., 1998). Strains with the morphotypes: rdar (red dry and rough) are cellulose and curli positive, pdar (pink dry and rough) are cellulose positive, bdar (brown dry and rough) are curli positive and saw (smooth and white) are negative for both components.

TABLE II
Physical and chemical properties of oil samples
from oil batteries 10-22, 5-27, and 10-17

| | Location | | | | | |
|---|---|---|---|---|---|---|
| Properties | Chauvin, Alberta | | Chauvin, Alberta | | Chauvin, Alberta | |
| Oil Battery | 10-22 | | 5-27 | | 10-27 | |
| Number of | 36 | | 119 | | 162 | |
| wells^{a} | | | | | | |
| pH | 7.4 | | 7.4 | | 7.4 | |
| Specific gravity | 1.06 | kg/m³ | 1.06 | kg/m³ | 1.06 | kg/m³ |
| Water content | 0.40% | | 0.29% | | 0.14% | |
| Absolute | 955.1 | kg/m³ | 917 | kg/m³ | 946.7 | kg/m³ |
| density | | | | | | |
| API gravity | 16.6 | kg/m³ | 22.8 | kg/m³ | 17.9 | kg/m³ |
| Sulphur | 25.3 | g/kg | 24.7 | | 28.7 | g/kg |
| Total solids | 81315 | mg/lt | 82900 | mg/lt | 86159 | mg/lt |
| dissolved | | | | | | |
| Viscosity | 863 | mPas | 87.05 | mPas | 644.5 | mPas |

^{a}Recovery and isolation of microbes were pooled from duplicate oil samples provided from each battery.

TABLE III
Source of organisms

| | | | | | |
|---|---|---|---|---|---|
| | | | Biofilm | | |
| | | | formation | | |
| Number | Strain ID | Identity | at 28° C. | Origin/morphotype | Source/provider |

BACTERIA
Salmonella strains/morphotypes

| | | | | | |
|---|---|---|---|---|---|
| 1 | UMR1 | Salmonella typhimurium | rdar* | Control | 1 |
| 2 | MAE14 | S. typhimurium | pdar* | Control | 1 |
| 3 | MAE299 | S. typhimurium | bdar* | Control | 1 |
| 4 | MAE775 | S. typhimurium | baw* | Control | 1 |
| 5 | S1V1 | Salmonella sp. | pdar | Environment | 1 |
| 6 | S3PP | Salmonella sp. | saw | Environment | 1 |
| 7 | S13V2 | Salmonella sp. | rdar | Environment | 1 |
| 8 | S2V3 | Salmonella sp. | rdar & saw | Environment | 1 |
| 9 | S1V3 | Salmonella sp. | saw | Environment | 1 |
| 10 | S4V2 | Salmonella sp. | pdar & saw | Environment | 1 |
| 11 | S10V1 | Salmonella sp. | pdar | Environment | 1 |
| 12 | S12PP | Salmonella sp. | rdar | Environment | 1 |
| 13 | S18V2 | Salmonella sp. | pdar & saw | Environment | 1 |
| 14 | S2V2 | Salmonella sp. | Combination | Environment | 1 |
| 15 | SC01 | Salmonella Serotype | rdar | Environment | 1 |
| | | I: 4, 5, 12: b: | | | |
| 16 | SC16 | Salmonella Serotype | saw | Environment | 1 |
| | | I: Rough-O:: e, n, x | | | |
| 17 | SC04 | Salmonella Serotype | rdar | Environment | 1 |
| | | Braenderup | | | |
| 18 | SCS7 | Salmonella Serotype | saw | Environment | 1 |
| | | Typhimurium | | | |
| 19 | SC110 | Salmonella Serotype | rdar | Environment | 1 |
| | | I: RoughO: y: e, n, x | | | |
| 20 | SC12 | Salmonella Serotype | rdar | Environment | 1 |
| | | I: Rough-O: e, h | | | |
| 21 | SC18 | Salmonella Serotype | rdar | Environment | 1 |
| | | Hartford | | | |
| 22 | SCS2 | Salmonella | rdar | Environment | 1 |
| | | Serotype: RoughO: e, h: e, | | | |
| 23 | WTCR5 | Salmonella Serotype | rdar/saw | Environment | 1 |
| | | I: 6, 7: r | | | |
| 24 | WTCR6 | Salmonella Serotype | rdar/saw | Environment | 1 |
| | | Stanley | | | |
| 25 | WTCR9 | Salmonella Serotype | rdar/saw | Environment | 1 |
| | | Infantis | | | |
| 26 | WTCR30 | Salmonella Serotype- | rdar/saw | Environment | 1 |
| | | Schwarzengrund | | | |
| 27 | WTCR22 | Salmonella Serotype | rdar/saw | Environment | 1 |
| | | Thompson | | | |
| 28 | WTC27 | Salmonella serotype | saw | Environment | 1 |
| | | Heidleberg | | | |
| 29 | WTC28 | Salmonella Serotype | rdar/saw | Environment | 1 |
| | | Monschaui | | | |
| 30 | WTCT4 | Serotype Heidleberg | rdar/saw | Environment | 1 |
| 31 | PARC#5 | S. agona | rdar/saw | Mung bean | 3 |
| 32 | SL1 | S. Newport | rdar | Human gut | 2 |
| 33 | SL2 | S. Hartford | rdar | Human gut | 2 |

Escherichia species

| | | | | | |
|---|---|---|---|---|---|
| 34 | E3-6 | Escherichia coli | NA | NA | 1 |
| 35 | E10-6 | E. coli | NA | NA | 1 |
| 36 | E14-6 | E. coli | NA | NA | 1 |
| 37 | E15-6 | E. coli | NA | NA | 1 |

Xanthomonas sp.

| | | | | | |
|---|---|---|---|---|---|
| 38 | B07.007 | Xanthomonas campestris | rdar | Lettuce | 4 |
| | | pv. vitians | | | |

FUNGI
Rhizoctonia sp.

| | | | | | |
|---|---|---|---|---|---|
| 39 | AG3-114 | R. solani | NA | Potato | 5 |
| 40 | AG1-1-ROS- | R. solani | NA | Soybean | 6 |
| | 2A4) | | | | |

Botrytis

| | | | | | |
|---|---|---|---|---|---|
| 41 | F-014 | Botrytis cinerea | NA | Strawberry | 7 |

*Strains displaying rdar (red dry and rough) are cellulose and curli positive, strains displaying pdar (pink dry and rough) are cellulose positive, strains displaying bdar (brown dry and rough) are curli positive, and strains displaying saw (negative for both components) are negative for both components, NA: not applicable.
1. J. Weadge, Wilfrid Laurier University, Ontario; U. Romling et al., (2003). Int. J. Med. Microbiol. 293, 273-285.
2. S. Bekal, The Laboratory of Public Health of Quebec (QPHL), Quebec.
3. S. Orban, Agriculture and Agri-Food Canada (AAFC), BC.
4. V. Toussaint, AAFC, St. Jean sur Richelieu, Quebec.
5. M. A. Cubeta , N.C. States University, NO, USA.
6. P. Ceresini, UNESP Sao Paolo, Brazil.
7. S. Jabaji, McGill University, Quebec.

### Isolation of Oil-Dwelling Bacteria

[0082] Unless otherwise stated, manipulation of oil samples was performed under sterile conditions in the laminar flow hood in order to avoid any contamination. Crude oil samples (10 mL of each) were mixed with an equal volume of sterile distilled water. The emulsion was vortexed and then continuously agitated (2×g) on a rotary shaker for 2 h, before the aqueous phase was recovered with a sterile pipette. This procedure was repeated five times, collecting a total of 50 mL of the aqueous phase for each sample from each well. Aliquots (100 μL) of the aqueous phase were plated on different microbiological culture media; potato dextrose agar (PDA), malt extract agar (MEA), nutrient agar (NA) and lysogeny broth agar (LBA) (BDH chemical Ltd, Mississauga, ON, Canada), and incubated at 28° C. Bacterial colonies that grew on culture media were passed through four rounds of single colony isolation by streaking them on the above-mentioned culture media to ensure purity of each strain prior to long-term storage. Pure bacterial cultures were stored in 20% (v/v) glycerol and kept at −80° C. until further use.

### Molecular Identification of Bacteria Recovered from Oil Bacterial strains were grown in LB broth for 18 h with agitation to obtain a final concentration of 10⁸-10¹⁰ colony forming units (CFU) mL⁻¹. Cells were pelleted by centrifugation, and DNA was extracted using the DNeasy® Blood & Tissue kit (Qiagen, Mississauga, Ontario) following the manufacturer's instructions. DNA concentration and quality were confirmed spectrophotometrically with a NanoDrop™ ND1000 spectrophotometer (NanoDrop, Wilmington, Del. USA) and on a 1% (w/v) agarose gel, respectively. The 16S rRNA gene sequences were amplified using the ITS primer pair 27F/534R (5′-AGAGTTTGATCCTGGCTCAG-3′) (SEQ ID NO: 112) and 534R (5′-ATTACCGCGGCTGCTGG-3′) (SEQ ID NO: 113) according to previously published protocols (Gagne-Bourgue et al., 2013; Scott et al., 2018) to putatively identify 123 bacterial strains. PCR amplification was performed in a Bio-Rad™ T100 Thermal Cycler using the iProof™ High-Fidelity (HF) PCR kit (Bio-Rad, Ontario, Canada) using 40 ng of genomic DNA for a 50 μL reaction following previously published protocols (Gagne-Bourgue et al., 2013; Scott et al., 2018). Negative and positive controls were included concurrently with each reaction according to previous protocols (Scott et al., 2018). Amplification of PCR products was confirmed on a 1% (w/v) agarose gel. Lower molecular weight PCR products were cloned into the pDrive™ vector (Qiagen) following the manufacturer's protocol. Purified plasmid DNA and PCR products were sequenced at Genome Quebec sequencing services (McGill University, Montreal, QC, Canada). Sequences were subjected to Blast™ search against the NCBI database using the algorithm megablast (http://www.ncbi.nlm.nih.gov/blast) to confirm identity through sequence homology. The obtained sequences were submitted NCBI GenBank.

### Enrichment of Biosurfactant Production by Oil-Dwelling Bacteria

[0083] For efficient degradation of complex hydrocarbon oil and the production of biosurfactants, 3.27 g/L of Bushnell and Haas (BHM) (BDH chemical Ltd) supplemented with 2% of each of crude oil (v/v), glucose (w/v) and molasses (v/v) as sole sources of carbon, adjusted to pH 7.0 and sterilized at 21 psi for 20 min was used. A 1 mL volume of bacterial cultures (grown at 22° C. for 18-24 h with agitation in LB broth) with an OD₆₀₀ between 0.6 and 1.0 was transferred to 100 mL of the carbon-amended BHM media. Inoculated media was incubated with continuous agitation (2×g) at 30° C. for 7 d and then the cell-free supernatant (CFS) was collected by centrifugation (6500×g at 4° C. for 20 min). Removal of any residual oil and/or live bacterial cells present in the cell-free supernatant was accomplished by filtration using a 0.22 μm Millipore™ filter (Millipore Sigma, Ontario, Canada) and kept at 4° C. until further use.

### Assays for Biosurfactant Production

[0084] Bacterial isolates originating from oil batteries (10-22, 5-27 and 10-17) were screened for biosurfactant production by applying the most commonly used assays in the literature; the oil-spreading test and drop-collapse assay (Thavasi, 2011; Youssef et al., 2004). Isolates were considered to have significant biosurfactant production if the clearing zone they produced was at least ≤1.0 cm in diameter in the oil spreading assay and ≤3.0 mm in the drop collapse assay (Youssef et al., 2004). In all assays unless otherwise stated, Triton™ X-100 (10 mg/mL) was used as the positive control, while sterile de-ionized water and un-inoculated hydrocarbon-amended BHM medium served as negative controls. All tests were replicated twice for each bacterial strain tested. Based on the above-mentioned criteria, the top biosurfactant producers were further screened using the CTAB agar method, emulsification assay, microplate assay, and hemolytic assay.

[0085] Drop collapse assay. The wells of a polystyrene 96 well micro-plate lid (Corning incorporated, USA) were coated with 2 μL of crude oil and left to dry for 24 h at 22° C. Filtered cell-free supernatant (5 μL) was transferred to the center of the oil coated well. The results were recorded after 1-2 min and considered positive for biosurfactant production when the oil drop was flat. Those that gave rounded drops were scored negative, an indication of the absence of biosurfactant production (Jain et al., 1991).

[0086] Oil spreading assay. The oil-spreading assay was performed in polystyrene petri dishes (100 mm×15mm) containing 20 μL of crude oil that was carefully layered over 20 mL of distilled water. A drop (˜10 μL) of filtered supernatant was carefully pipetted onto the center of the oil layer. The diameter of the clear zone on the surface of the oil layer was measured and compared to the negative controls (Ibrahim et al., 2013).

[0087] CTAB agar assay. CTAB agar plates were prepared by adding 0.15 g of cetyltrimethylammonium bromide (CT-Aldrich, Oakville, Ontario, Canada), 0.005 g Methylene blue (Sigma-Aldrich) and 12 g of agar to 1 L of distilled water, adjusted to pH 7 and sterilized (Tahzibi et al., 2004). Two holes (6.5 mm diameter) were made in the CTAB plates, and approximately 150 μL of filtered cell-free supernatant was loaded inside each hole. Plates were incubated at 37 ° C. for 48 h. Cell free supernatant containing anionic surfactant produced blue halos around the wells in which they were placed. The diameter of the halo was measured and compared with positive and negative controls.

[0088] Emulsification assay. A volume of 1 mL of the cell-free supernatant was added to 5 mL of 50 mM Tris buffer (pH 8.0) in a 30 mL screw-capped test tube. Crude oil was tested for emulsification activity. Crude oil (5 mg) was added to both layers and vortexed for 1 min and then the emulsion mixture was allowed to settle for 20 min. The optical density of the emulsified mixture was measured at 610 nm (Muthezhilan et al., 2014). A negative control consisted of only buffer solution and crude oil with Triton™ X-100 was used as the positive control.

[0089] Microplate assay. An aliquot of 50 μL of filtered cell-free supernatant was placed in domed PCR caps (Ultident Scientific, St. Laurent, Quebec, Canada) that were oriented over a grid of 1 mm×1 mm squares. The presence of biosurfactant was confirmed by the distortion of the grid image and were qualitatively compared to the positive and negative controls (Walter et al., 2010).

[0090] Hemolytic activity. Blood agar plates were prepared by adding 5% (v/v) of sheep blood (Fisher scientific) to a sterilized mixture of NaCl (10 g), yeast (5 g), tryptone (10 g) and agar (15 g) in 1 L of distilled water (Phan et al., 2013). Approximately 150 μL of filtered cell free supernatant of each bacterial isolate was loaded into each well (6.5 mm in diameter) made by a cork borer in the blood agar plates and incubated at 30° C. for 24-48 h. Biosurfactant biosynthesis was confirmed by hemolysis activity as indicated by the presence of clearing zones around the wells. The diameter of the lysis zone was scored as ‘−’ no lysis, ‘+’ partial hemolysis, ‘++’ moderate hemolysis , ‘+++’ complete hemolysis.

[0091] Antimicrobial Activity of Whole Cultures of B. methylotrophicus OB9

[0092] Isolate OB9 exhibited the highest activity for oil displacement and emulsification activity. This strain was identified as B. methylotrophicus based on sequencing data and hereby designated as B. methylotrophicus OB9 (Jeukens et al., 2015). This strain was further screened for its antimicrobial activity against a wide panel of clinical and environmental bacterial strains (Table V) employing the Burkholder agar diffusion assay (Burkholder et al., 1944), and also against fungal phytopathogens using the dual confrontation assay (Gagne-Bourgue et al., 2013).

TABLE IV
Top biosurfactant-producing isolates of three oil wells 10-22, 5-27, 10-17

| | | | OIL | DROP | GENBANK |
|---|---|---|---|---|---|
| | | STRAIN | SPREADING | COLLAPSE | ACCESSION |
| RANK | NAME | ID | (CM)* | (MM)** | NUMBER |
| Well 10-52 | | | | | |
| 1 | Bradyrhizobium sp. | OB55 | 1.6 ± 0.1& | 3.5 ± 0.0 | MG926629 |
| 2 | Streptomyces sp. | OB45 | 1.6 ± 0.7 | 3.0 ± 0.0 | MG926620 |
| 3 | Streptomyces sp. | OB44 | 2.0 ± 0.6 | 3.5 ± 0.0 | MG926618 |
| 4 | Bacillus amyloliquefaciens | OB10 | 2.1 ± 0.2 | 3.5 ± 0.0 | MG926639 |
| 5 | Bacillus nealsonii | OB51 | 2.6 ± 0.0 | 4.0 ± 0.0 | MG926626 |
| 6 | Microbacterium sp. | OB14 | 2.3 ± 0.2 | 3.5 ± 0.0 | MG926642 |
| 7 | Bacillus methylotrophicus | OB43 | 2.4 ± 0.7 | 3.5 ± 0.0 | MG926614 |
| 8 | Streptomyces yanglinensis | OB41 | 2.6 ± 0.1 | 3.5 ± 0.0 | MG926610 |
| 9 | Bacillus amyloliquefaciens | OB5 | 3.2 ± 0.3 | 3.8 ± 0.3 | MG924914 |
| 10 | Streptomyces sp. | OB42-1 | 3.3 ± 0.1 | 3.5 ± 0.1 | MG926612 |
| 11 | Bacillus amyloliquefaciens | OB6 | 3.6 ± 0.3 | 4.3 ± 0.3 | MG926633 |
| 12 | Bacillus velezensis | OB9 | 3.8 ± 0.1 | 4.3 ± 0.6 | MG926638 |
| | (previously methylotrophicus) | | | | |
| Well5-27 | | | | | |
| 1 | Bacillus simplex | E05 | 1.5 ± 0.0 | 3.5 ± 0.0 | MG946778 |
| 2 | Micrococcus testaceum | E47 | 1.5 ± 0.2 | 3.3 ± 0.1 | MG926596 |
| 3 | Rhodococcus sp. | E51-2 | 1.6 ± 2.7 | 3.5 ± 0.0 | MG627949 |
| 4 | Bacillus methylotrophicus | E62 | 1.7 ± 0.3 | 3.7 ± 0.2 | MG946778 |
| 5 | Pseudomonas sp. | E14 | 2.2 ± 0.1 | 4.8 ± 0.3 | MG946770 |
| 6 | Bacillus subtilis | E64 | 2.0 ± 0.2 | 3.8 ± 0.3 | MG946784 |
| 7 | Bacillus subtilis | E68 | 2.6 ± 0.3 | 3.8 ± 0.0 | MG946779 |
| 8 | Arthrobacter sp. | E45 | 2.9 ± 0.4 | 4.2 ± 0.3 | — |
| Well 10-17 | | | | | |
| 1 | Bacillus methylotrophicus | M16-3 | 2.2 ± 0.0 | 3.4 ± 0.1 | MH627955 |
| 2 | Bacillus subtilis | M46-2 | 2.6 ± 0.1 | 3.3 ± 0.1 | MH627971 |
| 3 | Bacillus methylotrophicus | M05-2 | 2.7 ± 0.2 | 3.4 ± 0.1 | MH627945 |
| 4 | Bacillus subtilis | M43 | 2.9 ± 0.1 | 3.4 ± 0.2 | MH627966 |
| 5 | Bacillus amyloliquefaciens | M36 | 2.9 ± 0.1 | 3.4 ± 0.2 | MH627961 |
| 6 | Bacillus amyloliquefaciens | M27 | 3.0 ± 0.1 | 3.2 ± 0.1 | MH627959 |
| 7 | Bacillus velezensis | M50 | 3.0 ± 0.1 | 3.4 ± 0.1 | MH627972 |
| 8 | Kokuria rhizophila | M20 | 3.1 ± 0.1 | 3.5 ± 0.0 | MH627956 |
| 9 | Staphylococcus saprophyticus | M44 | 3.1 ± 0.0 | 3.2 ± 0.1 | MH627967 |
| 10 | Bacillus velezensis | M05 | 3.2 ± 0.2 | 3.4 ± 0.1 | MH627944 |
| 11 | Bacillus amyloliquefaciens | M30 | 3.4 ± 0.1 | 3.4 ± 0.1 | MH627960 |
| 12 | Bacillus velezensis | M09 | 3.4 ± 0.0 | 3.4 ± 0.2 | MH627948 |
| 13 | Bacillus velezensis | M21 | 3.4 ± 0.1 | 3.2 ± 0.1 | MH627957 |
| 14 | Bacillus subtilis | M42 | 3.5 ± 0.0 | 3.2 ± 0.1 | MH627965 |

*For oil spreading assay clearing zone of ≥1.5 cm is considered positive.
**For drop collapse assay above ≥3 mm is considered positive
&Values represent the mean of three replicates ± standard error of the mean (S.E.)

[0093] Agar diffusion assay. All target bacterial strains and B. methylotrophicus OB9 were grown in LB broth at 27° C. for 16-18 h with constant shaking to achieve mid-log phase, with a cell density of 10⁶ CFU mL⁻¹ as assessed based on standard curves relating optical density at 600 nm (OD₆₀₀) to plate counts on LBA plates. Cells were pelleted by centrifugation (6500×g at 4° C. for 20 min. and suspended in sterile ddH₂O. A total volume of 30 μL of each bacterial suspension was mixed gently with 2.5 mL of molten half-strength LB agar and poured into culture plates. An aliquot (10 μL) of B. methylotrophicus OB9 was spotted in the center of the bacterial lawn and plates were incubated at 24° C. Zones of bacterial growth-inhibition subjacent to the spotted B. methylotrophicus OB9 inoculum were recorded after 24-48 h and were found to vary in diameter between 3 to 6 mm depending on the potency of B. methylotrophicus OB9 antimicrobials that diffused into the agar. Individual trials were performed in triplicate and the entire assay was repeated twice to confirm the findings.

[0094] Dual confrontation assay. Confrontation assay plates were used to screen B. methylotrophicus OB9 for its ability to inhibit radial growth of Botrytis cinerea, and Rhizoctonia solani isolates according to the modified method of Gagné-Bourgue (Gagne-Bourgue et al., 2013). PDA plates were inoculated in the center with a 5 mm diameter mycelial plug taken from the edge of an actively growing fungal colony. A 5 μL volume of B. methylotrophicus OB9 (10⁶ CFU mL⁻¹) was deposited 25 mm on either side of the fungal colony. Triplicate plate assays were performed for each target fungal organism and radial growth inhibition of the fungus was measured 5 d post confrontation.

Purification and Fractionation of Biosurfactants of B. methylotrophicus OB9 by Thin Layer Chromatography (TLC)

[0095] The biosurfactant-producing B. methylotrophicus OB9 was cultured in 2 L of BHM broth supplemented with 2% (w/v) glucose, 2% (v/v) molasses and 2% (v/v) oil for 7 d with agitation (2×g) at 30° C. Bacterial cells were removed by centrifugation (5000×g at 4° C.) and the cell—free supernatant (CFS) was acidified to pH 2.0 with 2N HCL at 4° C. for 16 h resulting in a precipitate that was collected by centrifugation (5000×g for 10 min at 4° C.). The acid precipitate fraction (APF) was dissolved in water (100 mg/mL) and adjusted to pH 7.0 using 1N NaOH. The CFS sample and clean BHM culture medium were concentrated by freeze-drying for 48 h. All samples were stored at −80° C. until further use.

[0096] Separation of CFS and APF fractions was performed by thin layer chromatography (TLC). Acid-cleaned glass plates (20×20 cm) were coated with a thin layer of silica emulsion (160 grams of silica with 15% (w/v) calcium sulphate and with fluorescent indicator GF254 dissolved in 500 mL of double distilled water) purchased from Sigma-Aldrich and dried for 16-18 h at 22° C. Activation of silica plates was done by heating the TLC plates at 120° C. for 30 min prior to use. An amount of 100 mg of each of CFS and APF were dissolved in 400 μL of chloroform: methanol (2:1, v/v) and separated on activated TLC plates with chloroform: methanol: water (70:26:4) as the developing solvent system. Plates were observed under UV (λ=254 nm) and the retention factor (Rf) values were calculated as distance travelled by the samples over the distance travelled by solvent. Only APF separated fractions were used for bioactivity assays. Bands corresponding to the desired Rf values were scraped and collected for extraction. Bands of the same Rf value from different plates were pooled together and extracted twice with chloroform: methanol (v/v/; 2:1). The collected fractions were vacuum-concentrated for 4-6 h at −60° C. using a Speed Vac™ v78100 (Labconco Corp, Kansas City Mo., USA), re-dissolved in 50 μL of methanol and tested against target bacteria and fungi, as well as for biosurfactant activity. Methanol (50 μL) was used as a negative control.

### Biosurfactant and Antimicrobial Activities of TLC Fractions

[0097] The biosurfactant activity of the fractions was tested using the oil-spreading and the drop collapse methods, as described above. Fractions were also tested for their antimicrobial activities against a number of bacteria and fungi using the Burkholder diffusion plate method as noted above. Briefly, 10 μL of the dissolved fractions were spotted in the middle of the plates. Positive controls consisted of 10 μL of bleach and of each of the following organic acids: 1% (v/v) of acetic acid, formic acid, citric acid and lactic acid. All plates were incubated at 24° C. and a clearing zone of 3 mm or greater after 24 h of incubation was considered positive for inhibition of growth. Individual trials were performed in triplicate and the entire assay was repeated twice to confirm the findings.

Interaction of B. methylotrophicus OB9 with S. enterica Newport SL1 and X. campestris B07.007 in Liquid Co-Culture

[0098] This method was performed to study how B. methylotrophicus OB9 directly interacts with target strains of Salmonella enterica Newport SL1 and X. campestris B07.007. Each bacterium was grown in LB broth until a cell density of 10⁶ CFU mL⁻¹ was achieved, as assessed based on standard curves relating optical density at 600 nm (OD₆₀₀) to plate counts on LBA plates. An equal volume of B. methylotrophicus OB9 culture and target organisms (Salmonella or Xanthomonas) was added to fresh LB liquid culture amended with 3% (w/v) yeast extract. Pure cultures of Salmonella enterica Newport SL1, X. campestris and B. methylotrophicus OB9 grown in amended LB broth served as positive controls. Liquid co-cultures and controls were incubated with agitation (2×g) at 28° C. To avoid changes in growth during co-culturing due to pH variation or nutrient limitations, every 10 h liquid co-cultures and controls were subjected to centrifugation (15 min at 5000×g) and bacterial pellets were suspended in fresh amended LB medium. Serial dilutions (10⁻³ to 10⁻⁵) from control and liquid co-cultures were plated on LBA after 3, 6, 12, 24 and 72 h of incubation, estimated as log₁₀ CFU mL⁻¹ and compared to the control treatments. There were three replicates per target organism and treatment. Individual trials were also repeated at least twice.

Bacterization and Internalization of B. methylotrophicus OB9 in Tissue Cultured Tomato and Lettuce Seedlings.

[0099] Vegetable cultivars. Organic Tomato (cv. Beefsteak) and Cos lettuce (cv. Parris Island) seeds (Vesey seed Ltd, York, PE, Canada) were surface sterilized using 70% (v/v) ethanol and 1.3% (v/v) sodium hypochlorite in a stepwise procedure according to Scott et al., 2018. The seeds were transferred to tissue culture tubes (25 mm×150 mm; VWR, PA, USA) containing 10 mL of Murashige and Skoog (MS) medium supplemented with 3% (w/v) sucrose (Gagné-Bourque et al., 2015). Tissue culture tubes were incubated under 200 μmol m⁻² s⁻¹ white fluorescent light, 18/6-h photoperiod, and 24° C. day/night temperature for 2 weeks.

[0100] Preparation of B. methylotrophicus 0B9 inoculum. Inoculum of B. methylotrophicus OB9 was prepared by transferring a single colony to 100 mL of LB broth and incubating with agitation (2×g) at 28° C. Bacterial cells were harvested by centrifugation (4500×g for 15 min at 4° C.), washed with10 mM phosphate buffer (PBS) containing 0.8% (w/v) NaCl, pH 6.5 (phosphate buffered saline or PBS) and then suspended in the same buffer following another round of centrifugation (Pillay et al., 1997). The density of the B. methylotrophicus OB9 suspension was adjusted to 10⁶ CFU mL⁻¹ as described above.

[0101] Bacterization of plant seedlings with B. methylotrophicus OB9. A 500 μL volume of B. methylotrophicus OB9 in PBS buffer was carefully dispensed on the surface of the MS media and close to the roots of 2-week-old tomato and lettuce seedlings. Non-bacterized seedlings received 500 μL of PBS only and served as negative controls. Inoculated and control seedlings were returned to the environmental growth chamber and grown for 2 more weeks. The experimental unit was an individual plant contained in a test tube (a replicate) and 5 replicates per treatment were evaluated in two separate experimental trials. Bacterial populations were transformed to obtain homogeneity of variances and expressed as log₁₀ (CFU per leaf fresh weight).

[0102] Colonization, internalization and retrieval of B. methylotrophicus OB9 from plant tissue. Recovery and colonization of plant tissues by B. methylotrophicus OB9 was confirmed by culture-dependent (cell count) and culture-independent (PCR assay) methods. Cell counts (CFU mL⁻¹) were estimated 2 weeks post inoculation (wpi). Root and leaf tissues (100 mg of each) of tomato and lettuce seedlings were surface sterilized as described above to ensure that only B. methylotrophicus OB9 that had internally colonized plant tissues remained. The efficiency of the sterilization procedure was tested using the imprint method and absence of growth on the imprinted culture medium indicated that the surface sterilization procedure was effective. Surface sterilized tissues (100 mg) were ground in sterile distilled water, serially diluted (10⁻¹ to 10⁻⁷) and spread on LBA plates to assess the presence of B. methylotrophicus OB9. The presence of B. methylotrophicus OB9 inside plant tissues was also confirmed by PCR amplification. Briefly, bacterized Plant DNA (200 mg) was reduced to powder in liquid nitrogen and genomic DNA was extracted using the CTAB extraction method (Huang et al., 2011; Porebski et al., 1997) that targeted the bacterial DNA in the plants. Genomic DNA from pure colonies of B. methylotrophicus OB9 was extracted and PCR was performed (Huang et al., 2011). The presence of B. methylotrophicus OB9 DNA in plant tissue was detected using specific primers [5′-CAAGTGCCGTTCAAATAG-3′ (SEQ ID NO: 114) (Forward) and 5′CTCTAGGATTGTCAGAGG-3′ (SEQ ID NO: 115) (reverse)] in 25 μL PCR reactions using 20 ng of DNA. The amplification and PCR conditions are described in detail in (Gagné-Bourque et al., 2015).

Protection of Tomato and Lettuce Leaves by B. methylotrophicus OB9 from Salmonella and Xanthomonas

[0103] Preparation of Salmonella and Xanthomonas for leaf inoculation. Salmonella enterica Newport SL1 (isolated from human gut) and X. campestris B07.007 (isolated from lettuce) were prepared by separately transferring a single colony of each strain into 100 mL of LB broth and incubating with agitation (2×g) at 28° C. Bacterial cells were harvested, and the density of each culture was adjusted to 10⁶ cells mL⁻¹ following the same procedures described for B. methylotrophicus OB9 cells above. Two separate experiments were set up to study the effect of B. methylotrophicus OB9 on growth of Salmonella and Xanthomonas on plants.

### Statistical Analysis

[0104] In the co-culture experiment, there were three replicates per target organism and treatment, and the assays were repeated twice. In the tissue culture experiments (experiment 1 and experiment 2), each experimental unit consisted of one leaf per petri plate (one replicate). There were 5 replicates per treatment, and the entire experiment was repeated twice. Data of bacterial cell counts in co-culture and in tissue-culture experiments (Experiments 1 and 2) were analyzed by One-way ANOVA using the JMP 13.0 software. All experimental data were tested for statistical significance using Tukey's HSD (P≤0.05).

### EXAMPLE 2: BACTERIAL DIVERSITY OF CRUDE OIL-INHABITING BACTERIA

[0105] A total of 123 culturable bacteria, originating from crude oil samples were isolated from 3 oil batteries. A snapshot of the bacterial species in each oil battery, based on 16S rRNA gene sequences, indicated that the oil-inhabiting bacterial community is diverse (FIGS. 1A-C) and composed predominantly of bacteria (the majority identified to the species level) from 3 phyla (Actinobacteria, Proteobacteria, and Firmicutes) along with 17 discrete genera that shared high homology with known sequences. The full sequences of all strains have been deposited to GenBank under the following accession numbers (battery 10-22 MG924907-MG924915 and MG926585-MG92664, battery 10-17 MH627942-MH627972, and battery 5-27 MG946770-MG946789, and MG951760-MG951768). Strains belonging to the Gram-positive Bacillus genera (42, 39 and 32% from battery 10-17, 10-22, and 5-27, respectively) were the most common isolated across the three oil wells (FIGS. 1A-C). A total of 42 strains recovered from oil battery 10-22 were distributed among six different genera with the highest relative abundance among isolates being Bacillus (11/42), Microbacterium (13/42) and Streptomyces (7/42) species (FIG. 1A). Fifty isolates were recovered from oil battery 5-27 and belonged to 10 different genera, with Bacillus isolates again having the highest relative abundance (15/50). This battery also had isolates of Arthrobacter (10/50), Pseudomonas (7/50), Curtobacterium (7/50) and Brevibacterium (3/50) that were retrieved only from this oil well (FIG. 1B). Lastly, there were 31 isolates representing seven different genera recovered from well 10-27, with isolates of Staphylococcus (11/31), Stenotrophomonas (3/31), Alcaligenes (1/31), Kineococcus 1(31) and Pantoea (1/31) associated exclusively with this well (FIG. 1C).

### EXAMPLE 3: BIOSURFACTANT PRODUCTION

[0106] Thirty-four (34) isolates associated with Bacillus, Streptomyces, Microbacterium, Micrococcus, Rhodococcus, Pseudomonas, Arthrobacter and Staphylococcus genera retrieved from the three oil wells were identified as biosurfactant-producing bacteria using the oil—spreading and the drop collapse methods (Table IV). Isolates of Bacillus species showed the highest biosurfactant activities based on both tests. Strain OB9 isolated from oil well 10-22 and identified as B. methylotrophicus by whole genome sequencing (Jeukens et al., 2015, nucleotide sequence deposited at DDBJ/EMBUGenBank under accession number LGAU00000000) exhibited the highest biosurfactant activity followed by four strains of B. amyloliquifaciens (strains OB5, OB6, M30 and M09). Furthermore, these strains also tested positive for biosurfactant activity using the blood agar lysis method (a zone of 2.5 cm or greater), the CTAB method (a clearing zone of more than 1 mm), a significant grid using the microplate assay and in the emulsification assays (OD₆₀₀ value of 1.0) (Data not shown).

### EXAMPLE 4: ANTIMICROBIAL ACTIVITY OF B. METHYLOTROPHICUS OB9

[0107] B. methylotrophicus OB9 was effective against all tested bacteria and fungi with varying degrees of antimicrobial activity (Table V, below; FIG. 2). More specifically, live cultures of B. methylotrophicus OB9 inhibited the growth of 23 Salmonella serovars (environmental, clinical and foodborne isolates), 4 strains of E. coli, 10 environmentally isolated Enterobacteriaceae strains and an X. campestris pv. Vitians isolate (Table V, below, FIGS. 2B-D) in agar diffusion assays, as visualized by a clear zone around the B. methylotrophicus OB9 colony that developed over 24-48 h. The diameter of the inhibition zone ranged from 3-6 mm and with some E. coli and Salmonella serovars a clear zone with double rings was observed (Table V, below), indicating the potency of one or more antimicrobials. The greatest zones of inhibition (6 mm in diameter) in response to B. methylotrophicus OB9 were observed in trials with X. campestris pv. Vitians and Salmonella serovar I:Rough-O:e,h:e,n (FIGS. 2B and C). Other Salmonella serovars I:4,5,12:b:-,I:Rough-O:-:e,n,x, Hartford, and Heidelberg) were also highly sensitive to B. methylotrophicus OB9, exhibiting clearing zones of 5 mm.

[0108] Interestingly, the biofilm-forming phenotypes (i.e., rdar—denoting the presence of the extracellular polysaccharide, cellulose, and curli fimbriae; saw—denoting the absence of cellulose and curli; Table III, above) of the Salmonella strains did not affect the ability of B. methylotrophicus OB9 to elicit zones of clearing. Even all of the control S. enterica Typhimurium strains that express both cellulose and curli (UMR1), only cellulose (MAE14), only curli fimbriae (MAE299) or neither component (MAE775) had a measurable zone of clearing around the B. methylotrophicus OB9 colony on the plates. These results suggest that the antimicrobial activities of B. methylotrophicus OB9 are not significantly affected by the biofilm barrier that bacterial cells use to exclude other antimicrobial agents (including disinfectants and antibiotics).

[0109] The widespread effectiveness of B. methylotrophicus OB9 is further exemplified by its ability to also inhibit the growth of plant pathogenic fungi Rhizoctonia solani and Botrytis cinerea, as observed in the dual confrontation assays (Table V, below; FIG. 2A).

TABLE V
Antagonistic activity of OB9 cultures against bacteria and fungi

| | | | OB9 |
|---|---|---|---|
| | | | Live |
| S. NO | Strain ID | Identity | cells |
| 1 | UMR1 | Salmonella typhimurium | +++ |
| 2 | MAE14 | S. typhimurium | + |
| 3 | MAE299 | S. typhimurium | + |
| 4 | MAE775 | S. typhimurium | ++ |
| 15 | SC01 | Serotype 1: 4, 5, 12: b: | +++* |
| 16 | SC16 | Serotype I: Rough-O: : e, n, x | +++* |
| 17 | SC04 | Serotype Braenderup | ++ |
| 18 | SCS7 | Serotype Typhimurium | + |
| 19 | SC110 | Serotype I: Rough-O: y: e, n, x | ++ |
| 20 | SC12 | Serotype I: Rough-O: e, h | + |
| 21 | SC18 | Serotype Hartford | +++* |
| 22 | SCS2 | Serotype: Rough-O: e, h: e, | ++++ |
| 23 | WTCR5 | Serotype 1: 6, 7: r | + |
| 24 | WTCR6 | Serotype Stanley | + |
| 25 | WTCR9 | Serotype InfaNtis | ++ |
| 26 | WTCR30 | Serotype- Schwarzengrund | + |
| 27 | WTCR22 | Serotype Thompson | ++ |
| 28 | WTC27 | serotype Heidleberg | +++* |
| 29 | WTC28 | Serotype Monschaui | + |
| 30 | WTCT4 | Serotype Heidleberg | ++ |
| 31 | S. agona | PARC#5 S. agona | ++ |
| 32 | SL1 | S. Newport | ++ |
| 33 | SL2 | S. Hartford | ++ |
| 34 | B07.007 | Xanthomonas hortorum | ++++ |
| 35 | E3-6 | Escherichia coli | + |
| 36 | E10-6 | E. coli | ++ |
| 37 | E14-6 | E. coli | +++* |
| 38 | E15-6 | E. coli | + |
| 39 | AG3-114 | Rhizoctonia solani | +++ |
| 40 | AG1-1(ROS-2A4) | R. solani | + |
| 41 | F014 | Botrytis cinerea | + |

Clearing zone of and above 3 mm is considered as positive; + clearing zone of 3 mm, ++ clearing zone of 4 mm, +++ 5 mm, ++++ 6 mm.
** Double ring of clearing zone.

### EXAMPLE 5: FRACTIONATION OF BIOSURFACTANT FROM B. METHYLOTROPHICUS OB9

[0110] Biosurfactants were partially purified from culture filtrates of B. methylotrophicus OB9 grown in BHM broth enriched with oil. The purification procedure consisted of HCl precipitation, concentration of the precipitate by freeze-drying, dissolution in methanol-chloroform and analysis by TLC (FIG. 3A). Fractionation of cell free supernatant (CFS) yielded 4 fractions (1-4), while the acid precipitate fraction (APF) separated into 5 parts. Between the CFS and APF samples, fractions 2 and 3 from the respective samples had identical Rf values (0.68 and 0.23) (FIG. 3A).

### EXAMPLE 6: BIOSURFACTANT AND ANTIMICROBIAL ACTIVITY OF THE ACID PRECIPITATE FRACTION (APF) OF B. METHYLOTROPHICUS STRAIN OB9

[0111] Only APF fractions (1-5) were assayed for biosurfactant and antimicrobial activities due to their improved purity and concentration relative to the CFS samples. All of the 5 TLC purified fractions of APF showed biosurfactant activity in the drop-collapse and oil-spreading assays (FIGS. 3B-3C). Fractions 3 and 5 had strong antimicrobial activities in diffusion agar plates against 13 test bacteria. This test panel included six Salmonella enterica serovars originating from the environment (SCS2), human fecal matter (SL1), or contaminated fresh produce (S. agoni Parc#5), as well as strains of E. coli and X. campestris (Data not shown) (a plant pathogenic bacterium) (Table VI, below; FIGS. 4A-D). Additionally, the APF fractions were moderately effective against two fungal plant pathogens (R. solani and B. cinerea) (Table VI, below; FIG. 4E); thereby indicating that these fractions have widespread microbial bioactivity. Furthermore, the size of the inhibition zones produced by the APF fractions (especially fraction 5) was comparable to that produced by the positive controls (Control (+ve), bleach (FIG. 4A) or common organic acids (lactic and acetic acid controls; FIGS. 4B-D) used as disinfectants and antimicrobials. Interestingly, the crude APF fraction (i.e., prior to TLC separation into fractions 3 (F3) and 5 (F5)) exhibited weak antimicrobial activity against the 13 bacteria and only one of the fungi (Table VI, below). Thus, isolation and partial enrichment of these fractions has increased their relative concentrations and/or efficacy.

TABLE VI
Microbial activity of the B. methylotrophicus OB9 fractions, organic
acids and bleach against various pathogenic bacteria and fungal strains

| | | | | | TLC Fractions | | Organic Acids^{a} | | | | Bleach |
|---|---|---|---|---|---|---|---|---|---|---|---|
| NO | Strain ID | Identity | Live cells | APF | F3 | F5 | AA | LA | FA | CA | 1.3% |
| 1 | UMR1 | Salmonella enterica Typhimurium | +++ | + | ++ | +++ | ++ | + | +++ | + | ++ |
| 2 | MAE14 | S. enterica Typhimurium | + | + | ++ | ++ | ++ | ++ | +++ | + | ++ |
| 3 | MAE299 | S. enterica Typhimurium | + | + | +++ | ++ | ++ | + | +++ | + | ++ |
| 4 | MAE775 | S. enterica Typhimurium | ++ | + | ++ | ++ | +++ | + | +++ | + | ++ |
| 5 | SCS2 | S. enterica I: Rough-O: e, h: e, n | ++++ | + | ++ | ++ | ++ | + | +++ | + | ++ |
| 6 | PARC#5 | S. enterica Agona | ++ | + | + | ++ | ++ | + | +++ | + | ++ |
| 7 | SL1 | S. enterica Newport | ++ | + | ++ | ++ | ++ | + | +++ | + | ++ |
| 8 | SL2 | S. enterica Hartford | ++ | + | ++ | ++ | ++ | + | +++ | + | ++ |
| 9 | B07.007 | Xanthomonas campestris | ++++ | + | ++ | +++ | +++ | ++ | +++ | ++ | ++ |
| 10 | E3-6 | Escherichia coli | + | + | ++ | ++ | ++ | + | +++ | + | ++ |
| 11 | E10-6 | E. coli | ++ | + | ++ | ++ | ++ | + | +++ | + | ++ |
| 12 | E14-6 | E. coli | +++^{b} | + | ++ | ++ | ++ | + | +++ | + | ++ |
| 13 | E15-6 | E. coli | + | + | ++ | ++ | ++ | + | +++ | + | ++ |
| 14 | AG3 (114) | Rhizoctonia solani | +++ | + | + | ++ | ++ | + | +++ | + | ++ |
| 15 | AG1-1A (ROS-2A) | R. solani | + | − | + | + | ++ | + | +++ | + | ++ |
| 16 | F014 | Botrytis cinerea | + | − | + | + | ++ | + | +++ | + | ++ |

^{a}Various organic acids (1%) tested as controls: AA, Acetic acid; LA, lactic acid; FA, formic acid; CA, citric acid.
^{b}Double ring of clearing zone. (+) clearing zone of 3 mm; (++) clearing zone of 4 mm; clearing zone of 5 mm (+++); clearing zone of 6 mm. (++++)

### EXAMPLE 7: SUPPRESSION OF SALMONELLA AND XANTHOMONAS GROWTH DURING CO-CULTURE WITH B. METHYLOTROPHICUS OB9

[0112] Salmonella cell numbers in liquid co-cultures with B. methylotrophicus OB9 significantly (P<0.05) decreased at 3 h (31-fold) and 6 h (45-fold) after incubation compared to growth controls (FIG. 5A). Similarly, X. campestris was 5 recovered 3 h and 6 h after incubation in co-cultures, with significant decreases of 22- and 47-fold in cell number, respectively (FIG. 5C). Furthermore, neither S. enterica Newport nor X. campestris were retrieved from co-cultures after 12 h or more of incubation (FIGS. 5A and C), while B. methylotrophicus OB9 continued to grow at a comparable rate to cultures of B. methylotrophicus OB9 alone (FIGS. 5B and D). To rule out the possibility of nutrient competition as a source of the antagonistic behaviour, media was replaced every 10 h, but this did not affect results.

### EXAMPLE 8: RECOLONIZATION, INTERNALIZATION, AND DETECTION OF BACTERIAL ISOLATES IN PLANT TISSUES

[0113] The surface-sterilization method combined with the imprint technique ensured that the endophytic colonization numbers reflected only the cells within the interior of the plant tissues (i.e., bacterized), as non-colonized plants did not yield culturable bacterial colonies (data not shown). Subsequent isolation and quantification of B. methylotrophicus (OB9) following surface sterilization demonstrated that the strain can travel from the roots to the stems and leaves and develop sustained endophytic populations in plant tissues of tomato (log₁₀ 7) and lettuce (log₁₀ 8) grown under gnotobiotic conditions even after the plants were challenged with Salmonella and Xanthomonas strains (FIGS. 6A-D and 7A-B).

### EXAMPLE 9: IMPACT OF PLANTS BACTERIZED WITH B. METHYLOTROPHICUS OB9 ON THE GROWTH OF SALMONELLA AND XANTHOMONAS

[0114] Tomato and lettuce leaves of B. methylotrophicus OB9 bacterized plants were detached and placed separately into petri plates lined with sterile filter paper that was moistened with sterile distilled water. An aliquot (100 μL) of each of Salmonella enterica Newport SL1 and X. campestris B07.007 inoculum (10⁶ cells mL⁻¹) was spread with a disposable spreader (Fischer Scientific Ltd) onto the surface of a tomato or lettuce leaf (S. enterica Newport SL1 and X. campestris B07.007, respectively). Non-bacterized leaves of tomato and lettuce were inoculated in the same manner and served as negative controls. All plates were sealed with parafilm and incubated at 22° C. Recovery of bacterial strains was determined by cell count after 72 h. Leaf tissue (100 mg) from infected and bacterized or non-bacterized plants was macerated in distilled water and serially diluted (10⁻¹ to 10⁻⁷) and aliquots from each dilution were plated on LBA plates and bacterial cell counts were estimated and reported as log₁₀ mL⁻¹. Detection of Salmonella on tomato leaves was confirmed by PCR with Salmonella specific primers ST11 (5′-GC CAA CCA TTG CTA AAT TGG CGC A-3′) (SEQ ID NO: 116) and ST15 (5′-GGT AGA AAT TCC CAG CGG GTA CTG-3′) (SEQ ID NO: 117) using an annealing temperature of 57° C. with PCR conditions described previously (Soumet et al., 1999). Detection of X. Campestris on lettuce leaves was confirmed using primers XcpM1 (5′-ACGCGCTACCAAAAGGCAAAGAG-3′) (SEQ ID NO: 118) and XcpM2 (5′-GATCTGCGGTTGTCCTGAAGATTGG-3′)(SEQ ID NO: 119) in conventional PCR assays (Sulzinski et al., 1996).

[0115] Leaves of B. methylotrophicus (OB9) bacterized tomato and lettuce plants challenged with Salmonella and Xanthomonas appeared healthy compared to challenged non-bacterized plants (FIGS. 6A-D). There was a significant (P<0.05) reduction of Salmonella cells (44% or 4.4-fold decrease) recovered from bacterized tomato leaves after 72 h (FIGS. 6A-B and 7A) compared to challenged non-bacterized leaves. In the case of Xanthomonas, there was no growth as reflected by complete absence of cells from bacterized lettuce tissues after 72 h (FIGS. 6B-C and 7B). Amplification of genomic DNA extracted from bacterized leaf samples using designed B. methylotrophicus OB9 specific primers gave the expected band size of 565 bp in leaf and root tissue samples (data not shown). Similarly, amplification of Salmonella from bacterized plants gave the expected band size of 429 bp, so the presence/absence of these bacteria was confirmed by this secondary method (data not shown). PCR amplification of Xanthomonas DNA was not successful using the XcpM 1/XcpM2 primers so this organism could not be detected in coated and challenged lettuce leaves by this secondary method.

### EXAMPLE 10: DIRECT INTERACTION OF B. METHYLOTROPHICUS OB9 WITH SALMONELLA ENTERICA NEWPORT SL1 OR WITH X. CAMPESTRIS B07.007 ON LEAF SURFACES

[0116] Tomato and lettuce leaves were submerged in 100 mL (10⁶ cells mL⁻¹) of B. methylotrophicus OB9 in a petri plate for 30 s and then left for 2 h. Aliquots (100 μL) of each of Salmonella and Xanthomonas strains (10⁶ cells mL⁻¹) were spread on the leaves, and incubated in petri plates at 22° C. Inoculums of Salmonella or Xanthomonas strains were also spread on non-inoculated tomato or lettuce leaves and served as experimental controls. After 72 h of incubation, recovery of bacterial cells from the leaves was determined by tissue maceration and cell count determination as described above.

[0117] In this experiment, where tomato and lettuce leaves were coated with B. methylotrophicus OB9 (as opposed to bacterized as in Example 9) and challenged with Salmonella and Xanthomonas, similar trends were noted to the bacterized experiment. Recovery of Salmonella cell-numbers from these leaves was significantly decreased by 54% (5.4-fold decrease) compared to leaves treated with Salmonella alone (FIG. 7C). As in the bacterized experiment, Xanthomonas was not recovered in the B. methylotrophicus OB9 coating experiments either (FIG. 7D).

[0118] The scope of the claims should not be limited by the embodiments set forth in the examples but should be given the broadest interpretation consistent with the description as a whole.

### REFERENCES

[0119] Akbari, S., Abdurahman, N. H., Yunus, R. M., Fayaz, F., and Alara, O. R. (2018). Biosurfactants—a new frontier for social and environmental safety: a mini review. Biotechnology Research Innovation. 2, 81-90.
[0120] Alajlani, M., Shiekh, A., Hasnain, S., and Brantner, A. (2016). Purification of bioactive lipopeptides produced by Bacillus subtilis strain BIA. Chromatographia 79, 1527-1532.
[0121] Barak, J., Whitehand, L., and Charkowski, A. (2002). Differences in attachment of Salmonella enterica serovars and Escherichia coli 0157: H7 to alfalfa sprouts. Appl. Environ. Microbiol. 68, 4758-4763.
[0122] Brooijmans, R. J., Pastink, M. I., and Siezen, R. J. (2009). Hydrocarbon-degrading bacteria: the oil-spill clean-up crew. Microb. Biotechnol. 2, 587-594.
[0123] Burkholder, P. R., Evans, A. W., Mcveigh, I., and Thornton, H. K. (1944). Antibiotic activity of lichens. Proc. Natl. Acad. Sci. U. S. A. 30, 250.
[0124] Cai, M., Nie, Y., Chi, C. Q., Tang, Y. Q., Li, Y., Wang, X. B., Liu, Z. S., Yang, Y., Zhou, J., and Wu, X. L. (2015). Crude oil as a microbial seed bank with unexpected functional potentials. Sci. Rep. 5, 16057.
[0125] Cawoy, H., Debois, D., Franzil, L., De Pauw, E., Thonart, P., and Ongena, M. (2015). Lipopeptides as main ingredients for inhibition of fungal phytopathogens by Bacillus subtilis/amyloliquefaciens. Microb. Biotechnol. 8, 281-295.
[0126] Chandankere, R., Yao, J., Choi, M. M., Masakorala, K., and Chan, Y. (2013). An efficient biosurfactant-producing and crude-oil emulsifying bacterium Bacillus methylotrophicus USTBa isolated from petroleum reservoir. Biochem. Eng. J. 74, 46-53.
[0127] Chaprão, M. J., Rita De Cássia, F., Rufino, R. D., Luna, J. M., Santos, V. A., and Sarubbo, L. A. (2018). Production of a biosurfactant from Bacillus methylotrophicus UCP1616 for use in the bioremediation of oil-contaminated environments. Ecotoxicology. 27, 1310-1322.
[0128] D'aes, J., De Maeyer, K., Pauwelyn, E., and Höfte, M. (2010). Biosurfactants in plant-Pseudomonas interactions and their importance to biocontrol. Environ Microbiol Rep. 2, 359-372.
[0129] Debode, J., Maeyer, K. D., Perneel, M., Pannecoucque, J., Backer, G. D., and Höfte, M. (2007). Biosurfactants are involved in the biological control of Verticillium microsclerotia by Pseudomonasspp. J. Appl. Microbiol. 103, 1184-1196.
[0130] Deering, A. J., Mauer, L. J., and Pruitt, R. E. (2012). Internalization of E. coli O157: H7 and Salmonella spp. in plants: a review. Food. Res. Int. 45, 567-575.
[0131] Díaz De Rienzo, M. A., Stevenson, P., Marchant, R., and Banat, I. M. (2015). Antibacterial properties of biosurfactants against selected Gram-positive and-negative bacteria. FEMS Microbiol. Lett. 363, fnv224.
[0132] Fletcher, J., Leach, J. E., Eversole, K., and Tauxe, R. V. (2013). Human pathogens on plants: designing a multidisciplinary strategy for research. Phytopathology 103, 306-315.
[0133] Gagne-Bourgue, F., Aliferis, K., Seguin, P., Rani, M., Samson, R., and Jabaji, S. (2013). Isolation and characterization of indigenous endophytic bacteria associated with leaves of switchgrass (Panicum virgatum L.) cultivars. J. Appl. Microbiol. 114, 836-853.
[0134] Gagné-Bourque, F., Mayer, B. F., Charron, J.-B., Vali, H., Bertrand, A., and Jabaji, S. (2015). Accelerated growth rate and increased drought stress resilience of the model grass Brachypodium distachyon colonized by Bacillus subtilis B26. PLoS One. 10, e0130456.
[0135] Gibson, D., White, A., Snyder, S., Martin, S., Heiss, C., Azadi, P., Surette, M., and Kay, W. (2006). Salmonella produces an O-antigen capsule regulated by AgfD and important for environmental persistence. J. Bacteriol. 188, 7722-7730.
[0136] Heydari, A., and Pessarakli, M. J. J. O. B. S. (2010). A review on biological control of fungal plant pathogens using microbial antagonists. J. Biol. Sci. 10, 273-290.
[0137] Hsu, C.-K., and Micallef, S. A. (2017). Plant-mediated restriction of Salmonella enterica on tomato and spinach leaves colonized with Pseudomonas plant growth-promoting rhizobacteria. Int. J. Food Microbiol. 259, 1-6.
[0138] Huang, B., Lv, C., Zhuang, P., Zhang, H., and Fan, L. (2011). Endophytic colonisation of Bacillus subtilis in the roots of Robinia pseudoacacia L. Plant Biol. 13, 925-931.
[0139] Ibrahim, M., Ijah, U., Manga, S., Bilbis, L., and Umar, S. (2013). Production and partial characterization of biosurfactant produced by crude oil degrading bacteria. Int Biodeterior Biodegradation. 81, 28-34.
[0140] Jain, D., Collins-Thompson, D., Lee, H., and Trevors, J. (1991). A drop-collapsing test for screening surfactant-producing microorganisms. J. Microbiol. Methods 13, 271-279.
[0141] Jemil, N., Ayed, H. B., Hmidet, N., and Nasri, M. (2016). Characterization and properties of biosurfactants produced by a newly isolated strain Bacillus methylotrophicus DCS1 and their applications in enhancing solubility of hydrocarbon. World J. Microbiol. Biotechnol. 32, 175.
[0142] Jeukens, J., Kukavica-lbrulj, I., Freschi, L., Jabaji, S., and Levesque, R. C. (2015). Draft genome sequences of two lipopeptide-producing strains of Bacillus methylotrophicus. Genome Announc 3, e01176-01115.
[0143] Korenblum, E., Souza, D. B., Penna, M., and Seldin, L. (2012). Molecular analysis of the bacterial communities in crude oil samples from two Brazilian offshore petroleum platforms. Int. J. Microbiol. 2012.
[0144] Lenchi, N., Inceoğlu, Ö., Kebbouche-Gana, S., Gana, M. L., Lliros, M., Servais, P., and Garcia-Armisen, T. (2013). Diversity of microbial communities in production and injection waters of Algerian oilfields revealed by 16S rRNA gene amplicon 454 pyrosequencing. PLoS One. 8, e66588.
[0145] Lynch, M. F., Tauxe, R. V., Hedberg, C. W. (2009). The growing burden of foodborne outbreaks due to contaminated fresh produce: risks and opportunities. Epidemiol. Infect. 137, 307-315.
[0146] Magot, M., Ollivier, B., and Patel, B. K. (2000). Microbiology of petroleum reservoirs. Antonie Van Leeuwenhoek 77, 103-116.
[0147] Mani, P., Dineshkumar, G., Jayaseelan, T., Deepalakshmi, K., Kumar, C. G., and Balan, S. S. (2016). Antimicrobial activities of a promising glycolipid biosurfactant from a novel marine Staphylococcus saprophyticus SBPS 15. 3 Biotech. 6, 163.
[0148] Marchant, R., and Banat, I. M. (2012). Biosurfactants: a sustainable replacement for chemical surfactants? Biotechnol. Lett. 34, 1597-1605.
[0149] Marchut-Mikolajczyk, O., Drożdżyński, P., Pietrzyk, D., & Antczak, T. J. M. c. f. (2018). Biosurfactant production and hydrocarbon degradation activity of endophytic bacteria isolated from Chelidonium majus L. 17(1), 171.
[0150] McNees, C. R., Greenhut, I. V., Law, A. D., Saleem, M. and Moe, L. A. (2019). Life within the leaf: ecology and applications of foliar bacterial endophytes. In Endophytes for a Growing World, ed. T. R. Hodkinson, F. M. Doohan, M. J. Saunders and B. R. Murphy. (Cambridge: Cambridge University Press), Chapter 10. 208-230.
[0151] McSpadden Gardener, B. B. (2004). Ecology of Bacillus and Paenibacillus spp. in agricultural systems. Phytopathology. 94, 1252-1258.
[0152] Meena, K. R., and Kanwar, S. S. J. B. R. I. (2015). Lipopeptides as the antifungal and antibacterial agents: applications in food safety and therapeutics. Biomed Res. Int. 2015.
[0153] Milanov, D. S., Prunić, B. Z., Velhner, M. J., Pajić, M. L., and C̆abarkapa, I. S. (2015). RDAR morphotype: A resting stage of some Enterobacteriaceae. Food and Feed Research. 42, 43-50.
[0154] Moore, T., Globa, L., Barbaree, J., Vodyanoy, V., and Sorokulova, I. (2013). Antagonistic activity of Bacillus bacteria against food-borne pathogens. Probiotics Health 1, 1-6.
[0155] Mulligan, C. N. (2005). Environmental applications for biosurfactants. Environ. Pollut. 133, 183-198.
[0156] Murray, K., Wu, F., Shi, J., Jun Xue, S., Warriner, K., and Safety (2017). Challenges in the microbiological food safety of fresh produce: Limitations of post-harvest washing and the need for alternative interventions. Food Quality and safety. 1, 289-301.
[0157] Muthezhilan, R., Ragul, R., Pushpam, A. C., and Hussain, A. J. (2014). Production and Purification of Biosurfactant from Marine Yeast Isolated from Kelambakkam Salterns. Biosci., Biotechnol. Res. Asia. 11, 59-67.
[0158] Nicolas, O., Charles, M. T., Jenni, S., Toussaint, V., and Beaulieu, C. (2018). Relationships between Xanthomonas campestris pv. vitians population sizes, stomatal density and lettuce resistance to bacterial leaf spot. Can. J. Plant Pathol. 40, 399-407.
[0159] Nitschke, M., and Costa, S. (2007). Biosurfactants in food industry. Trends Food. Sci. Technol. 18, 252-259.
[0160] Obi, L. U., Atagana, H. I., and Adeleke, R. A. (2016). Isolation and characterisation of crude oil sludge degrading bacteria. SpringerPlus 5, 1946.
[0161] Parthipan, P., Preetham, E., Machuca, L. L., Rahman, P. K., Murugan, K., and Rajasekar, A. (2017). Biosurfactant and degradative enzymes mediated crude oil degradation by bacterium Bacillus subtilis A1. Front. Microbiol. 8, 193.
[0162] Perfumo, A., Rancich, I., and Banat, I. M. (2010). “Possibilities and challenges for biosurfactants use in petroleum industry,” in Biosurfactants. Springer), 135-145.
[0163] Phan, C.-W., Abu Bakar, N. F., and Hamzah, A. (2013). A comparative study on biosurfactant activity of crude oil-degrading bacteria and its correlation to total petroleum hydrocarbon degradation. Bioremediat. J. 17, 240-251.
[0164] Pillay, V., and Nowak, J. (1997). Inoculum density, temperature, and genotype effects on in vitro growth promotion and epiphytic and endophytic colonization of tomato (Lycopersicon esculentum L.) seedlings inoculated with a Pseudomonad bacterium. Can. J. Microbiol. 43, 354-361.
[0165] Porebski, S., Bailey, L. G., and Baum, B. R. (1997). Modification of a CTAB DNA extraction protocol for plants containing high polysaccharide and polyphenol components. Plant Mol. Biol. Rep. 15, 8-15.
[0166] Römling, U., Bian, Z., Hammar, M., Sierralta, W. D., and Normark, S. (1998). Curli fibers are highly conserved between Salmonella typhimurium and Escherichia coli with respect to operon structure and regulation. J. Bacteriol. 180, 722-731.
[0167] Roy, A. (2017). Review on the Biosurfactants: Properties, Types and its Applications. J. Fundam. Renew. Energy Appl. 8, 2.
[0168] Sachdev, D. P., and Cameotra, S. S. (2013). Biosurfactants in agriculture. Appl. Microbiol. Biotechnol. 97, 1005-1016.
[0169] Saleem, M., Meckes, N., Pervaiz, Z. H., & Traw, M. B. J. F. i. m. (2017). Microbial interactions in the phyllosphere increase plant performance under herbivore biotic stress. 8, 41.
[0170] Santos, D., Rufino, R., Luna, J., Santos, V., & Sarubbo, L. J. I. j. o. m. s. (2016). Biosurfactants: multifunctional biomolecules of the 21st century. 17(3), 401.
[0171] Santoyo, G., Moreno-Hagelsieb, G., Del Carmen Orozco-Mosqueda, M., and Glick, B. R. (2016). Plant growth-promoting bacterial endophytes. Microbiol. Res. 183, 92-99.
[0172] Schikora, A., Garcia, A. V., and Hirt, H. (2012). Plants as alternative hosts for Salmonella. Trends Plant Sci. 17, 245-249.
[0173] Scott, M., Rani, M., Samsatly, J., Charron, J.-B., and Jabaji, S. (2018). Endophytes of industrial hemp (Cannabis sativa L.) cultivars: identification of culturable bacteria and fungi in leaves, petioles, and seeds. Can. J. Microbiol. 64, 664-680.
[0174] Snyder, T. R., Boktor, S. W., and M'lkanatha, N. M. (2019). Salmonellosis Outbreaks by Food Vehicle, Serotype, Season, and Geographical Location, United States, 1998 to 2015. J. Food Prot. 82(7), 1191-1199.
[0175] Soumet, C., Ermel, G., Rose, V., Rose, N., Drouin, P., Salvat, G., and Colin, P. (1999). Identification by a multiplex PCR-based assay of Salmonella typhimurium and Salmonella enteritidis strains from environmental swabs of poultry houses. Lett. Appl. Microbiol. 29, 1-6.
[0176] Stepanović, S., Ćirković, I., Ranin, L., and Svabić-Vlahović, M. (2004). Biofilm formation by Salmonella spp. and Listeria monocytogenes on plastic surface. Lett. Appl. Microbiol. 38, 428-432.
[0177] Sulzinski, M., Moorman, G., Schlagnhaufer, B., and Romaine, C. (1996). Characteristics of a PCR-based assay for in planta detection of Xanthomonas campestris pv. pelargonii. J. Phytopathol. 144, 393-398.
[0178] Tahzibi, A., Kamal, F., and Mazaheri Assadi, M. (2004). Improved production of rhamnolipids by a Pseudomonas aeruginosa mutant. Iran. Biomed. J. 8, 25-31.
[0179] Thavasi, R. (2011). Microbial biosurfactants: from an environmental application point of view. J. Bioremediat. Biodegrad. 2.
[0180] Trias, R., Bañieras, L., Montesinos, E., and Badosa, E. (2008). Lactic acid bacteria from fresh fruit and vegetables as biocontrol agents of phytopathogenic bacteria and fungi. Int. Microbiol. 11, 231.
[0181] Varjani, S. J., and Gnansounou, E. (2017). Microbial dynamics in petroleum oilfields and their relationship with physiological properties of petroleum oil reservoirs. Bioresour. Technol. 245, 1258-1265.
[0182] Varjani, S. J., and Upasani, V. N. (2017). Critical review on biosurfactant analysis, purification and characterization using rhamnolipid as a model biosurfactant. Bioresour. Technol. 232, 389-397.
[0183] Walter, V., Syldatk, C., and Hausmann, R. (2010). “Screening concepts for the isolation of biosurfactant producing microorganisms.,” in Biosurfactants. Bioscience and Springer Science+Business Media), 1-13.
[0184] Wang, T., Sun, H., Mao, H., Zhang, Y., Wang, C., Zhang, Z., Wang, B., and Sun, L. (2014). The immobilization of heavy metals in soil by bioaugmentation of a UV-mutant Bacillus subtilis 38 assisted by NovoGro biostimulation and changes of soil microbial community. J. Hazard. Mater. 278, 483-490.
[0185] Wu, J.-Y., Yeh, K.-L., Lu, W.-B., Lin, C.-L., and Chang, J.-S. (2008). Rhamnolipid production with indigenous Pseudomonas aeruginosa EM1 isolated from oil-contaminated site. Bioresour. Technol. 99, 1157-1164.
[0186] Wulff, E. G., Mguni, C. M., Mortensen, C. N., Keswani, C. L., and Hockenhull, J. (2002). Biological control of black rot (Xanthomonas campestris pv. campestris) of brassicas with an antagonistic strain of Bacillus subtilis in Zimbabwe. Eur. J. Plant Pathol. 108, 317-325.
[0187] Xiao, M., Sun, S.-S., Zhang, Z.-Z., Wang, J.-M., Qiu, L.-W., Sun, H.-Y., Song, Z.-Z., Zhang, B.-Y., Gao, D.-L., and Zhang, G.-Q. (2016). Analysis of bacterial diversity in two oil blocks from two low-permeability reservoirs with high salinities. Sci. Rep. 6, 19600.
[0188] Xu, X., Liu, W., Tian, S., Wang, W., Qi, Q., Jiang, P., Gao, X., Li, F., Li, H., and Yu, H. (2018). Petroleum hydrocarbon-degrading bacteria for the remediation of oil pollution under aerobic conditions: A perspective analysis. Front. Microbiol. 9, 2885.
[0189] Yoshida, N., Yagi, K., Sato, D., Watanabe, N., Kuroishi, T., Nishimoto K., et. al. (2005). Bacterial communities in petroleum oil in stockpiles. J. Biosci. Bioeng. 99, 143-149.
[0190] Youssef, N. H., Duncan, K. E., Nagle, D. P., Savage, K. N., Knapp, R. M., and Mcinerney, M. J. (2004). Comparison of methods to detect biosurfactant production by diverse microorganisms. J. Microbiol. Methods. 56, 339-347.
[0191] Zhao, H., Shao, D., Jiang, C., Shi, J., Li, Q., Huang, Q et. al (2017). Biological activity of lipopeptides from Bacillus. App. Microbiol. Biotechnol. 101(15), 5951-5960.
[0192] Zogaj, X., Nimtz, M., Rohde, M., Bokranz, W., and Römling, U. (2001). The multicellular morphotypes of Salmonella typhimurium and Escherichia coli produce cellulose as the second component of the extracellular matrix. Mol. Microbiol. 39, 1452-1463.

1. Method of using a bacterium that is a Bacillus, Streptomyces, Microbacterium, Micrococcus, Rhodococcus, Pseudomonas, Arthrobacter or Staphylococcus and/or a biosurfactant-containing extract isolated from said bacterium, as an antimicrobial agent against at least one foodborne bacterial or fungal pathogen and/or at least one plant bacterial or fungal pathogen.

2. The method of claim 1, wherein the bacterium is (i) a Bacillus, or (ii) a Bacillus velezensis; or a Bacillus amyloliquefaciens.

3. (canceled)

4. The method of claim 1, wherein (a) the bacterium produces, or the biosurfactant-containing extract contains, at least 3 of bacilysin, difficidin, macrolactin H, bacillaene, bacillomycin D, fengycin, surfactin and bacillibactin; and/or (b) the bacterium encodes at least 10 of SEQ ID NOs: 1-111.

5. (canceled)

6. The method of claim 1, wherein the bacterium is a Bacillus velezensis OB9.

7. The method of claim 1, wherein the bacterial or fungal pathogen is (a1) a Salmonella, an Escherichia coli, an Enterobacteriaceae, an Xanthomonas campestris, a Rhizoctonia solani or a Botrytis cinereal; or (a2) a Salmonella or a Xanthomonas campestris.

8. (canceled)

9. The method of claim 1, wherein the at least one bacterial or fungal pathogen comprises at least one foodborne pathogen and at least one plant pathogen.

10. The method of claim 1, wherein the at least one bacterial or fungal pathogen comprises a plant pathogen, and wherein the method comprises bacterizing a plant or coating food or a plant with the bacterium, preferably wherein the plant is a tomato plant or a lettuce plant.

11. (canceled)

12. The method of claim 1, wherein the at least one bacterial pathogen comprises a biofilm producing bacterial pathogen, preferably a Salmonella such as a Salmonella enterica.

13. (canceled)

14. (canceled)

15. The method of claim 1, wherein the method uses the biosurfactant-containing extract isolated from said bacterium, preferably an acid precipitate fraction of the biosurfactant-containing extract.

16. (canceled)

17. A plant or plant part bacterized or coated with a Bacillus or a biosurfactant-containing extract isolated from the Bacillus.

18. The plant or plant part of claim 17, wherein the Bacillus is a Bacillus velezensis.

19. The plant or plant part of claim 17, wherein (i) the Bacillus produces, or the biosurfactant-containing extract contains at least 3 of bacilysin, difficidin, macrolactin H, bacillaene, bacillomycin D, fengycin, surfactin and bacillibactin; or (ii) the Bacillus encodes at least 10 of SEQ ID NOs: 1-111.

20. (canceled)

21. The plant or plant part of claim 17, wherein the Bacillus is Bacillus velezensis OB9.

22. The plant or plant part of claim 17, which is a tomato or a lettuce plant, plant part or cell.

23. A method of protecting a plant or plant part against at least one bacterial or fungal pathogen comprising bacterizing or coating the plant or plant part with a Bacillus or a biosurfactant-containing extract isolated from the Bacillus, wherein the Bacillus produces or the extract contains at least 3 of bacilysin, difficidin, macrolactin H, bacillaene, bacillomycin D, fengycin, surfactin and bacillibactin.

24. The method of claim 23, wherein the Bacillus is a Bacillus velezensis.

25. The method of claim 23, wherein (A) (i) the Bacillus encodes at least 10 of SEQ ID NOs: 1-111; and/or (B) the method comprises (i) bacterizing or coating the plant; or (ii) bacterizing or coating the plant part.

26. The method of claim 23, wherein the Bacillus is a Bacillus methylotrophicus OB9.

27. (canceled) 28. (canceled)

29. The method of claim 23, wherein the at least one bacterial or fungal pathogen comprises a Salmonella, an Escherichia coli, an Enterobacteriaceae, an Xanthomonas campestris, a Rhizoctonia solani or a Botrytis cinereal.

30. The method of claim 23, wherein the at least one bacterial pathogen comprises a Salmonella or a Xanthomonas campestris.

The application's sequence listing, which the Patent Office published only in electronic form, follows.

SEQUENCE LISTING (119 sequences)

SEQ ID NO: 1 - protein, 412 aa, Bacillus velezensis
MNSKQTDHIETKRRFPICLALALTLGVFAAGSEELVISPLLPDLARAFSSDVSVLALSISIYGVMIFIGAPLLVPLGDKYSRELSLMAGLLIFTAGTVICALAHNLFFFFLGRALSGLAAGAFVPTAYAVVGDRVPYAYRGKVMGLIVSSWSLALIFGVPIGSFIGGVLNWRWTFWIFALMSVLVASLIFIEARRSTADGDKTEEENGRQAGTFRDALKVPRVPVYLTITFCNMIGFYGMYSFLGTYLHRVLPGGNTASGLLIMVYGVGFSMSVFTGKIADKAGKMRSLIAALAVISIWLSCLAYAPSSMPFLVIGLFVWGLMQSLTVTLLSTILSDCSQSRRGKIMAFYSLASNLAVTLGSAVMGPVYVGYGYAAVGFICAAVTLIGFVLSVFAYRRYEKYEHQADQSLYR

SEQ ID NO: 2 - protein, 204 aa, Bacillus velezensis
MIILDNSIQTKSKAYSISKLITINTLGPEGTSSEYAAKNFITNFTLLQGVNSKLSLHDTFESCIEKTLQSPLEYTIVPHAYDGIKHFYMRPDLQLLQIFRCDTPMYGLAVRPGFEYTDDMLDQTVIVSHPSPINLIKYFTRKDVTFDLVNSTSAAAKRVKDGLSDIALTNELARQKYGLHFVKTFKSIPMSWSLFGKGEIHDEN

SEQ ID NO: 3 - protein, 236 aa, Bacillus velezensis
MKTEQDLQELYFPTPKLIEWDNGVRQYSSVRGDTEVLLSYVPPHTNVEPHQHKEVQIGLVVSGELSMTVGDVTRKMTALESAYIAPPNVPHGARNETDQEVIAIDIKRLKAGETYTSPEDYFLNIFKTRDLLPGMEVTFFVEDWVEIMLANIPGNGGEMPFHKHRNEQIGICIGGGYDMTIEGCKVDMTFGTAYFCDPREDHGAINRFEKDSKSVNIFFPPRYNRAKAKKLEAEES

SEQ ID NO: 4 - protein, 253 aa, Bacillus velezensis
MNLTDKTVLITGGASGIGYAAVQAFLNQQANVVVADIDEAQGEAMIRKENNDRLHFVQTDITDEPACQNAIQSAADKFGGLDVLINNAGIEIVAPIHEMELSDWNKVLNVNLTGMFLMSKHALKYMLKSGKGNIINTCSVGGVVAWPDIPAYNASKGGVLQLTRSMAVDYAKHNIRVNCVCPGIIDTPLNEKSFLENNEGTLEEIKKEKAKVNPLLRLGKPEEIANVMLFLASDLSSYMTGSAITADGGYTAQ

SEQ ID NO: 5 - protein, 472 aa, Bacillus velezensis
MERKTVLVIADLGGCPPHMFYKSAAEKYNLVSFIPRPFAITASHAALIEKYSVAVIKDKDYFKSLADFEHPDSIYWAHEDHDKPEEEVVEEIVKVAGMFAVDAITTNNELFIAPMAKACERLGLRGAGVQAAENARDKNKMRAAFNRAGVKSIKNKRVTTLEDFRAALQEIGTPLILKPTYLASSIGVTLIKERETAEAEFNRVNEYLKSINVPKAVTFEAPFIAEEFLQGEYDDWYETSGYSDYISIEGIMADGEYFPVAIHDKTPQIGFTETSHITPSILDDDAKRKIVEAAKKANEGLGLENCATHTEIKLMKNREAGLIESAARFAGWNMIPNIKKVFGVDMAQLLLDVLCFGKEADLPKGLLEQEPCYVADCHLYPQHFKENGQLPETAVDFVIESIDIPGGVLKGDTEIVSFSAAEAGTSVDLRLFEAFNSIAAFELKGSNSGDVAESIKQIQQQAKLTAKYALPV

SEQ ID NO: 6 - protein, 393 aa, Bacillus velezensis
MKQLKPNSKYLLFGQALSFMGDYCVLPALLILSTYYHDYWVTSGVIAVRSIPMVFQPFLGVLVDRLDRVKIMLWTDVIRGVIFLGLTFLPKGEYPLLFLALLFVSYGSGVFFNPARLAVMSSLEADIKNINTLFAKATTISIIVGAAAGGLFLLGGSVELAVAFNGVTYLVSAFFISRIKLQYVPIQSENVREAFQSFKEGLKEIKTNAFVLNAMFTMITMALLWGVVYSYFPIVSRFLGDGEIGNFILTFCIGFGGFIGAALVSKWGFNNNKGLMYFTVLSIVSLALFLFTPIFAVSVIAAILFFIAMEYGEVLAKVKVQENAANQIQGRIFSVAEASIGLCIAVGSMLINIVDAAVIMAFIVLLVSGLFLHTKLVNKSFSERNNESEQIHL

SEQ ID NO: 7 - protein, 399 aa, Bacillus velezensis
MEIIPSDVIKTLPKQEFSLVFQKVKEMEKTGAQIINLGQGNPDLPTPPHIVETLREAALNPSYHGYGPFRGYPFLKEAIAEFYEREYGVSVNPETEVALFGGGKAGLYVLTQCLLNPGDIALVPNPGYPEYLSGITMARAELHEMPLHPENGYLPDFERIDPAVLKKAKLMFLNYPNNPTGATADQAFYEKAAAFAKKHDIHLIHDFAYGAFEFDQNPASFLQAKEAKTVGAELYSFSKTFNMAGWRMAFAVGNEKIIQAVNEFQDHVFVGMFGGLQQAAAAALSGNPEHTERLKRTYKERIDFFTALCEKELGWSIEKPKGTFYVWAEIPNEFESSHQFSDYLLEHAHVVVTPGEIFGNGGKRYVRISMVAKKGDLREFVLRIQKLGLSFPSLQETSR

SEQ ID NO: 8 - protein, 752 aa, Bacillus velezensis
MLTFVFPGQGSQFKGMGAGLFDEFQDLTRQADDILGYSIEELCLEDPNHQLGKTQFTQPALYTVSALSYLKKMKESGREPDYAAGHSLGEYNALFAAGCFDFETGLQLVKKRGELMSKAAPGGMAAVLGFTAEQVKEVLSDYHLTGIDIANHNSPSQIVIAGTKQDIEKAGPVFEKAGVRMYLPLNVSGAFHSRYMKDAEKEFADYLEETAFLPLRFPVISNLHAAPYKNDEIKTNLTLQMTNQVKWTDTIRRLMGLENNEIAEVGPGEVLTKLTSQIKKDAVPLPMPKEESDTADVKGSAADPQKTAGMRLGNEDFKKDYNIQYAYMTGSMYRGIASEQMVIKAAKAGMLGFFGTGGVSIERIGQAIGTIRSALRQGETFGMNLLHHMMSPDKEVRMIDLYLKNGIHLIEASAFMGITPALVIYRAKGLSRNHDGSVSVQNKIIAKVSRPEVAEAFLNPAPAHVLERLVSDNRLTAGEAALAKEIPMADDICVEADSGGHTDQGIPYTLMPAMIRLRDRMMEKHGYTKKVRIGAAGGIGTPEAAAAAFLLGAEFIGTGSINQCTVEAGTSDSVKDLLQEANVQDTSYAPAGDMFEAGARVQVLKKGLFFPARANKLFDLYRQYNSLDEIDEKTKTLIEEKYFQRSFEEVYEQLKRDKSPEQIAKAEQNPKHKMAMVFKWYFSHTTRLALEGKSESKIDYQIHCGPALGAFNQWVKGTPLENWRNRHVDLIGKQLMEETAGLLAQRLVSITG

SEQ ID NO: 9 - protein, 326 aa, Bacillus velezensis
MLIENHELTMSHVGLGNLNEYALLLLFGNAHSHHLTDGTGFRPDQMADHQGLILYPAYFMTHLKVPSDQPLDQYRLWDEVSVGVDISRFGETILESDYLFGPKGAVSSDKSEWDRGRFPSMKANSLIVVDVTQTEGSTRKVSAPKAECIAELSKLAKPPYALMRSKKIRTDAFGMKPGNLKTADPVSYRVPIDQDAAPGHAMVFAKFSKIMDAAEFEWMTRRSKPGFPVSIARHLFLLERETYYYGNCFADEELDIYMTGHIEECDPDFHGESLGMISVAKISYQIEVYMKRNHTLLAISKVDKLLAVPTSSQDHIPDYKRVIRSL

SEQ ID NO: 10 - protein, 90 aa, Bacillus velezensis
MEQTKEMKQIIAQIIQDIQEQQSYRAVEAGDDVRVIEDLGFSSLDIAQLVAQMEMETGVDPFSQGETISSITTVGSICDIYQKYMDSAQS

SEQ ID NO: 11 - protein, 454 aa, Bacillus velezensis
MKTESGGDISWVTDKLRETQDSEFLIFKGQTFTYDDLLTRISFFQKELEQNGIREGECVALIGDYSPNAIFLLMALLLNRNIVVPLSNESREKHLDMFEDAKVNQIIEINENDSWTLRAGSESASHPLLDDLRERGESGIIIFTSGTSGKSKASVLSAGRLLEKYKTAKRKPLRTLIFLKLDHIGGINTLFAILFNGGTIVTSDSRTPESVYQAVDKHAVQVLPATPTFLNMLLMSKADAGYNLSSLRLITYGTEPMPKSTLRGIHRLFPDVRLKQTYGLTELGIFSTKSKDSQSTWMKVGGAGTETKITGGTLWVRSESAMLGYLNAPSPFDEDGWYDTGDQVETDGEYIRILGRKSEIINVGGEKVFPAEVESVFLEIPNVRDVLITGRKNPITGEIVAAEAVLEKEEDIKSFRKRAVAHCKQKLQPYQIPQIISVTDRKLSNDRFKKIRNV

SEQ ID NO: 12 - protein, 245 aa, Bacillus velezensis
MNNGKVAVVSGGSRGLGKAIVHTLLDEDYKVAAFSRSESDFINTLRESEKYRGRFYWEAADAADDAAMKQFVLQVYRKFSRIDGLVNNAGLNLDQLLPLTNDEDIDRILNLNIGSVIKLTRNVSRVMLKQNSGSIVNISSIIGSRGFKGTSVYSASKAALDGLTRSLARELGSKGIRVNSLAPGFVDTDMTKNMPEKQKSQIIRRTPMGRLGETDDMTGLVRFLLSPESSFMTGQTMAIDGGLTC

SEQ ID NO: 13 - protein, 3096 aa, Bacillus velezensis
MKCINEFLRTVIAQKLGAEVTEAEDKTAFFTLGVTSLISEEIMTILHKEFTGLSETLLFEYPNIEKLSEFLSAQKRNPESVLEFKETEPDTGSRQEEELLPVQAAEKVPVQETDGSSDIAVIGMSGMFPKAENQHDFWDNLMENKDCVSEIPEDRWDSSYYSEEKTAEYASYSKWGGFIDHPDQFDPLFFSVSPWEADLMDPQQKLYVTCCWEAMEDAGYGNPAARPTDQIGVFAGVTWNEYSLIAHEEGFLKDQYKGPGSLYWGIPNRVSYFLDLHGPSIAVDTACSSSLVAVHQACQAIMSGDCEMALAGGVNLSLHPQKYMFLSQSHFLSSEGKCRSFGEGGDGYVPGEGAGAVLLKPLKKAIADKDHIYGVIKGSATNHGGKTTGYTVPNPEAHRDLILSALNRAAVSPADISYIEAHGTGTALGDPIEIRGLSMAFDKQTDEKNYCGIGSVKSNIGHLEAAAGIAGLIKVLLSMKHETLPASLHSEELNRKISFSNSPFYVVRNNRPWPAEGDKPRIAAISSFGAGGSNAHLIVGAYQPKRQADGNTEQKPHAVVLSAHSEQQLKEYAGKLSSFLARLENLPSAGGYSLENIAATLLSGREPFSFRLAVIASSLSELKQRLDGFVSGHSDGRYMYFGKASPGRPDVSGQSVSDPEKFAALWVKGLQGCKKPETPYQKVPLPTYPFLKETSWLTDQKKRYTKKPQNIKRREALHPLLDENISSARKGTFQKIFSKDEYFFKDHLVNEKYVLPGVCHLEMAAYGAGLWGERPVVSLQSVWYMDPIVTGTDPRSVMIEFEAEKERISYVIKEKGADGALFSQGEVICKEKGASFEAPAFQLPAPFAQRTEPEDIYHSFSEAGIVQKDSFQVIREFSYTERKALAKLTLPSHLEADFKQYILHPSLMDGAVQTAMAHVLQFQKEPVLIVPFSFGEIQLLEPLAKTVFVHAEVKAASVHQFDLHICDERGVLLAAVKDFIIKEVQESAGFNQKAGVTPKKSCETELLMTPVWNTVTIPETGMSFMREEKIIVIGAGPDFQQALKEMYSDVRFPDITSLDSAEQMAETLKAQGSFQHMIWAAPDHPIPSVYDADTAEGQEHGVMQLFRLVKALLLLNFDTEQLSLTICTFQAQPIHEHDEVNPSHASIHGLAGSLAKEYSNWNIRLLDLESQRGDRHLPDVFSLPSDPEGNPWVFRAGQWHRQQLAVCRPHADEPSLYRHGGVYVIIGGAGGIGEVWTEYMIQTYQAKIIWIGRRKKDTQIERKLKRLAALGPAPQYFSADAADYDSLKRAYDTIVKENGKVRGIIHSAIVLSDRSFANMEEDQFRASLSAKTDVSLQIARVAEAEGEPLDFLLFFSSMMSFQKAPGQSNYAAGCTFKDAFAKRISQKAPYAVKVVNWGFWGSVGVVASEQYRKRMERDGIASIEAPEAMKTLETLLSGPHDQLALIKTTDPVFMKDDLKEQVTVYPEKIPSALGQLTVNITQNDEAERLKASSVMSCMREMESLIEKMLVSTLYEMGAGLGQALPLFQSAAGITEQYSRWLKESFVLLNKLALTPEKTDLGQVWEEWERKKETWLRQKDMRAHVRLAEETLRVLPDILTGKLPATEVMFPDSSFRLVEGIYRNNIISDFFNDKLADTLIAVLKERLEKDLQAKIRILEIGAGTGGTSAAVMRKLKPYEAHIAEYCFTDISKAFLLHAEDIFGPEYPYVTYKIFNAEQPVSTEAPDIGTYDAVIATNVLHATKNIRSTLRHAKAMLQKNGQLLINEINSRTIFNHVTFGLLEGWWLYEDHDLRIPGCPGVDPAGWAEALSLEGFVHPLFPAETAHDLGQQIIAAESDGTVRLALTQASEEKPERRPYDAEGLSDDTLHFSLREKSVELMKKVIGEALKVPAHRLLSHEPLTAYGLDSILVVRLTNALKDVFGSVSSTLFFEYQTIDELADYFLSSRKEALERQFGNGRAHPENAGRVQAPAESAAPIPNVRERGITYLTELIGKTLKIPSGRMDPSVSLTAYGLDSILVVRLTNAFRNVFDQMTSTLFFEYQTIEEIADYLLLSQPEAFMKAMGVRKAQLSDHTDNLNVKQNKIPQNEEGSRTNGDPYIQDIAVIGLSGRYPGADHVDELWENVKAGRHSITEVPKDRWDWKTFYNEERGKWGSIYSKWGGFLDDIDKFDPLFFRISPAEAERMDPQERLFLQTAYSSIEDAGYTPATLCDSRKIGVFVGVMNSNYPTVPSDWSIANRVSFLFNFQGPSMAVDTACSSSLTAVHLAAESLRSGMSETAIAGGVNLIVDPAHYERLSAFSMLSPGDKCKSFGDSADGFVDGEGVGAIVLKPLAQAEKDGDHIYGVIKGSMLNAAGRTNAYMVPNPKAQFDLIAETLKRTDIHPRTVSYLEAHGTGTALGDPIEIDGLTKAFRLTTEDRQFCSIGSIKSNIGHLESAAGIAGITKLLLQLKHKRIAPSLHAAELNPNIEFEHTPFFVQQKETEWKRPVLNITGKMKEYPRIAGISSFGAGGSNAHVIIQEYVPSDSLKPMENASVSPQKPAVIILSARNEQQLSERARQLLDDVIRKKRSDGDLAKIAYTLQAGREPMAERLAFTAESIEELKMKLMSFSNDHNIEHAHIWRGRTAKHHSLAASLTSDEDMALTINAWLRKGKYGKLLDLWVKGLDVDWSALYQCNPGRISLPAYPFAKDRYWVTKADVSLDKTGSAKSEKAARLHPLLHANTSTFTAQRFTSVFSGHEPFFADHIVNGKPVLPGAAALEMARAAVTFAAEDLPGGKTGVRLKQIVWLRPVTALSEGVTLHVKLQPEENGDIAFEAYAEGEEPLVFFQGKAVLEETERAPVLDVEAVQARCGGRHLSKAECYEAFDSLGITYGPSHQALDAVYAGSGEVLAKLTLPPSAREEKEPFILHPSMLDAALQASIGLVLSDGSASGRPFLPFALQDMQVFSACRETMWAVLSSADGAYHIELCDENGAVCVRLTGLTARFLEEETEEKPLLLQPKWQESPPDEGSGQEESFRYVTLYGGMNAEDISGAVCAADGEGPIEDRYDACAAELSAIVTRLIKEKQKKKTLIQLLVPDRGEDNVLAGLAAFLKTAHLE

SEQ ID NO: 14 - protein, 326 aa, Bacillus velezensis
GVTAPDQPHCAIGSVKTNIGHTELAAGMAGLLKIILQMQHKTLVKSLHCETVNPYISLDGSPFYFVRDTQPWKAATDDSGNELPRRAGVSSFGFGGVNAHVVLEEYVSPVEEKQWTVGELQPSLFILSAKTAEQLKERAEQLCRYLEKTHSADGALAGIAYTLQLGRDEMEERLAVIAETKEELTNALNDFLSGKETGQNFFTGRNKAMKQLFTEMTDNAEMSGTVDQWIEAGKYTMLAKLWVQGLHVDWNKLYPDERPKKVSLPVYPFAKTHCWIPHSAQHIRHRETYETDTSPLETYERLLDELEKNEISIEAAVKRTIGFYRD

SEQ ID NO: 15 - protein, 2098 aa, Bacillus velezensis
MKEFLHRVFSDVKNKKMTKQDAIGILRDYDMRMGLRQAASLHPLAQQHISDETGQGFSAAFSGREFFLADVSLQRKKLMPGELLLEMARAAAVLTVKETEAVRLTHIVWSKPILTEAEPFHIEIRLIPAEGEAKRFEIYNPFSADFSHHDVYSQGMIQPVDAAPGMLDISRLKENSGSLMDQQQIEAITQNDTVQYSEHMKGIERIYASAGRMLADISIPLTNQKESARFGLPPCVMQSVTEACALLGGKEYKTLAPVSLDELLFYESCPDKVWAEIQEKAGSFYIDLCDEEGKIWASLSGLKLQPVIKTGAPGKTNAEHRSERLYEQTLLQLKTLFALTTKIAVSNIDTEEPLETYGIDSVTVTKLNRELSLLFGDLSKTVFYEYKTLGSLAAHFVTDYPKECRKWTNDDDHRSGISEQVLANEDFPVLPSFIKRKKRPAFSNENQTKEGIAIIGVSGRYPQAETLEEYWDNLAAGKDCVTEIPEERWEKDKYYNPDPETAVKEGKSYSKRGGFLKDAAFFDPLFFQISPRDALNMDPQERLFIEMCWQVLEDAGYTKEQLENLYNGRVGVFAGITKNGYGMYWKNGGALQPKTSFSSAANRVSYFLNLKGPSMPVDTMCSSSLTAIHEACENILRGECDMAIAGGVNVYTHPSAYAELSAYRMLSKDGTCKSFGEGGDGFVPGEGVGAVLLKPLSKAMADKDHIYGVIRGTHINHGGRTNGYTVPSPSAQADVISGALEKSGIHPRMISCIEAHGTGTELGDPIEIDGLTRAFQTKTSDKGFCAISSVKSNIGHLEAAAGIAGVTKLLLQLQKRKLAPSLHCRKLNPNIAFDRTPFAVQRELADWKRPVIEENGAQKEVPRIAGISSFGAGGANAHILIEEYIEPDREIYEPFTDEDPAVILLSAKQEASLKQRAQQLLQAIRKNDVTDRSLRDAAYTLQTGREAMEERAAFIVTSTEQLAEKLQRFIDGGTDGCFRGKSKQYKDILAVFKDEDMQEAVRKWMKRKKFAKLLELWVKGLKIEWSELYNGSLPHRISLPGYPFIKDRYWPDDAAPDNVRDAESHSETFREIRFLQKSWAESSRVPAKEVRGVIGIAADHQTGNLAVELSRYFPESEIIDAASPEISGDAARFGGLIDVTGCGTEINHDDGWIHRLQSLIDNRNRGRKLQLLCVTKGLEPFANETINLSGAKKAGLYRMLQSEYKDIRSRHMDAERTAEDPELANQIAEEFFRDSEDIEVCYRNGVRYHARLKETNSLAEKEFSFPKDHVLWITGGTRGLGYLFAWHFAERYGVTKLVLTGKETMPPKAEWDDHIKRNSPFSEKVRRIRDLEQKGVRTEVLSVSSGPEYEQAVSRVKEKMGPIGGVIHAAGAVDLDHPAFIRKTREQMMTVLEPKTDGLDLLYQALHKEPLRFFALFSSVSGVMPELGAGQSDYAMANAYMDYFAAAKGFPVLSIQWPSWKETGMGESKSRAYQKSGLKSITDREGLSLFDAIMAGDCGSVIMPAVIHPEKWEPDRLLLSSGLTETKQQEQADTESVEEWLTGICCRELRLEPSRFESDTPFQDYGADSIMLAQVSRAIGKRIKADLDPAVLYEYPTVAELAGWLETAYPEIKDAVSKPVQPEIPDVPIQTAAAVIQPSGAAAAQDIAVVGMSCRFPGAESIEAYWKLLSEGTSAIQRVPKERWKTEKADYAGLLQNVTHFDPEFFFIPEEDIRAMDIQSFLILEEALHLFRDSGYSLQEMKGRSAGVYLGGRGGSMPDENRLKHAKNPIVAAGPNYLAANLSQFFDLKGPSLVLDTACSSALVGMNMAIQALSCGEIDSAVVGGVSLLESGQTHRMFELRNLLSEEPAFHIFDRRTSGIVLGEGVGMVYLKTAAQAVKDGDRIHAVIKGISVNNDGRTAGPATPNIQAQKEVMAKALAKSGRKAEDISYIEANGSGSEVTDLLELRAIEAVYRMQNSAPCELGSMKPNIGHPLCAEGIAGFIKTVLMLSRRMRVPFLSGKEPMTHYDLSASPFYFSHALREWTDSPRIAAVSSFADGGTNAHVIVEAWEQEAYTPVRKPLPRQELKRRPIRPDKAESLHGNAHKSRPNTFWKQMKTY

SEQ ID NO: 16 - protein, 1908 aa, Bacillus velezensis
MQEQLLINNQHPVLKHHKAYGKELLPGLAYIDLIYQTFRENGFFHAGLELRHLSIFHPLAPEQGETILLSIDCTENGEGQWKVEVKGQKQGDEAAETKVYAAAQMHSVKPAGFQESVRMDAVKQTAAEIPLEDIYAECRDQELVHSGMMKGCGSVYQTEKEIYIDLSVQKDQLEHAEEAMFHPALIDASSIGSNVYLAPLTREEGQLFLPLFYESFYCTELLQTTCITKIKKESVTRKKDLVYVTMEFFNEEGRKVGELKNFANKLVRDPELINQKRQKKEPDGRNAVPAPQAEPAPSEPRRAEASAGLTEQCILYLKELLAARLNKPVKEIDPDIGYYEMGLDSPGLLDMVKEIERKIGTQLLPTLLFEYTTIAELAGYLCEHYGAGFGHAQSGHSSAEPLPREKKRTTQIRVKKSASAGTQNGDIAIVGMAGRYPGAKNLREFWANLKNGENSVTEVPRSRWDTRTYEHLRSPSGKPISKWGGFIDDPDCFDAKFFRISPREAEAKDPQERLFLETCWETIEDAGYTPETIVQPKGPNKRMNVGVFAGVMHMDYSLAGAEAAAKGLVFPYPLNYAPIANRVSYFCNFHGPSMAVDTVCSSSLTAVHMAAESLRRGECEAALAGGVNLSLHPTKYITYGLMDMHSSDGLCRTFGEGGTGYVSADGIGAVLLKPLHKAEEDKDHIYAVIKGSAVNHVGTVSGITVPSPVAQGDMIAECLEKTGIDPRTISYVEAHGTGTSLGDPIEIQGLVKAYRTFTEDRQFCAIGSVKSNIGHAESAAGISGLHKTVLQLFHKTLVPSLHSETINPYLRLEDSPFYVQQKTESWKRPAYTENGREHACPRRAGISSFGATGSNVHLILEEYRPKNPGITEDQERPYIVPLSAKNPERLKEYAARLLMFLKDKALEGSGPLHDKRDTMQNQLENALRGVLAEVLHVAAGSVDDEQDWKEFGLDVMQLTHFSELMTDQYGLAIDMTDLIQHTSVRTLAECLTNDEKHKNILSGLFGQSGLDKQPDESFSLRSLAYTLQTGRLAMEERLVFLVNDQADLIRKLTEFTERKQQIDGCFQGRSDSGTEIRGFLNDDQDTEELIRKWMDSGTYKKLAELWSKGFEIDWTRLYREEKPRRMSLPTYPFAKERYWIPEPDHPVTSVNTESRLHPLLHRNTSDLLEQKFSTILNGDEFFLADHIVRNKRVLPGAAYLEMARAAAELAAAPLAAGYTAKTGISLRYISWIRQAVHKKEPLRMTTGLSLEDNGNVSFQVYSNENDSDIYCEGSAVIEPLSEAPVLHIEQLKARCRKKVLSKEDCYAAFAKAEIVYGPSHQGIDHIYCGEKEALAKLVLPASVSDEAEQFVLHPSLIDSAFQAAIGVMNEDQAGYPEQPLMPFELHELTVFHPCSPNMWAAVFVTHETPAVRRMDIDICDERGNVCVRIKGFSARMAESAPAVTDNKQYDLPGNLTGAVKLMQVWDAEPIDNQTGFPISEAKAVIIGGTDGQADAVLRLFPKAVRFDIGQSASVEVISDRLRRLGEIQHMIWFAPQPADSHSHDQKSGVLQIFRAAKALIGLGYGKEQLGMTVITHQAQPITQYDEVRPAHSGVHGFVGSLAKEHPSWHIRLADLEDGGDFPAEDIFSLPRDRTGKAWVRRHQEWYRPQLLPVQSGPSESVPYRYGGVYVIIGGAGGIGEVWTDYMVTTYKARVVWIGRRPLDSRIRQKIDRYWSSGPAPEYIAADASDFPSLQRAYEQIKNTYGTISGVVHSAMVFANESVKDMEESQFHAGLAAKVDISVNIAEVFAKESLDFILFFSSVISYIKNPNQSHYAAGCAFKDAFAHELSGRLSCRVKVMNWGYWERADNHISEEFDRLSAIGLGLISRAEGMQALETLLTQPISRMGLMKLTKPIPIEGMNPHEFVTI

SEQ ID NO: 17 - protein, 3949 aa, Bacillus velezensis
MGKGDKQKDRTQLSLRTEISNQMKELNRLLLQVLRMTLRSMGLTGEAPAASCLPLYERWLEESIRLLDSDFKSGKTAAVWEEWHKKKNEWLKDPDMKAQALLADTVIQALPDILTGKIKATDVMFPDSSMELVEGIYKHNILADYYNDVLANEACMYVENVMKNNPEANIRLLEIGAGTGGTSSTLFKKLRPYQNHIQEYCYTDLSKAFLMHAEKEYGADNPYLTYQLFNVEQPAAGQGLHLRTYDIAIAANVLHATKNIRKTLRTAKAVLKKDGLLLVNELGGHTPFTHVTFGLLEGWWLYEDEALRIPGCPGLYPETWKSVLMAEGFHSIQFPAENERLHTQQIITAKSNGVIRQSREAYTAQKRQSNVPQTSSDRQLPIKQAGEGLSEKTAAFLIRAVAKVLKMPAEEINPLAPLDEYGIDSILIVQLTNELRDLVPDISSTLFFEYRTIGELAAFLAETKERELHAQFSEEVPHTEAASSGSLLEKSTEYLKQIVSAILKMPIEDVQAHTPLEEYGIDSILIVQLTNRVREDIPDISSTLFFEYPTIGGLAEYLVSSRQEDMAGIFKTNKEAEKAPHILQKKQSRKKSAGLTKRQAASFSEKAPPASEPPSKHLEVAIVGLAGRYPGAENVNEFWERLKTGEHGITEIPKDRWDWRDYYDETKGKEGRMYTKWGGFLTNIDKFDPLFFKISPKEAERMDPQERLFLETAYAALEDAGYTPDSLCAGKKVGVFAGVMNGNYPTGAHYHFIPNRVSYVFDFHGPSIAVDTACSSSLTAIHLAAESIRTGASECAIAGGVNLITDPVHYIGLSSMRMLSPSNACKAFGDKADGFVDGEGVGCIVLKPLKKAVEDHDHIYGVIKGSALNAGGKTNGFTVPNPNAQGEVIADAMERAGIDPRAISYLEAHGTGTSLGDPIEIAGLTKAFRRYTDANQFCSIGSVKSNIGHLESAAGIAAVTKILLQMKHGYLVPSLHSKQLNPEIDFETSPFIVQQETAEWRRPVIESEGVTREYPRIAGTSSFGAGGANAHLLIEEYEPAEMTSADTGRPALFVLSAKDKDRLRERALLLSDAAGHGTITDANLLDAAFTLQVGRVPMEERLAMTADSVSELEQKLIAFLNNAGSVSGVFTGRSDSAVTETEGTISDWMEKRQFDSLLNAWVHGTPVDWASLYKGALPHRISLPSYPFAKESYWMKREEPKTGTTEYVHPFLHENTSTLAEQSYHTSFTGREHVFQDVSGERVLSAAVYLEMALAAFHHAADSSEEKEIWIRTAAWTDPITGGLHGAGVNLSLLSEDEEGIHYEIYSDEEKLHHYGIIGQGNIQPSRVLDIASLQKDCRPLSFDYETPGTSGVTISKEFRTVEKLYAGESAVWAKLALTDESGCNPGYHLPPEFLDAAFHVLAKTEPSVHIVPEAVEELRVMRPCSSGMWMYINKKNQTGCDIQFCDETGTVCAEIKGIRMRQPSQQDHGQEEQSEMMIFEEMWKQQPLKKSIHEELKTVICFLTGEAARKHAYQSLQTLFPGAGVFFISQGEETQKLSNTHYQIKITDEQAYQETFRHIETAAGKADAVLYGWPLEDEKAVKDYSILYHVIRAAASLRSKPRRILLSAQCGTDTDISYAESWIGLERSLKLILPETDTAAVYFEQKGPLEKLIHNVCEELHSESFRSVMYSGEIRRVMEMKQTDIAPGEKRVIKSGKTYLITGGCGGLGLLFAGYFAEKGPVTLILTGRSAAAGPVLNKIKRLEASGSKVFYVQADAADQAQMEKGLQEVKEKGCGPIHGVIHAAGLQGTESILEKDLQTFQQVLSPKADGTAVLDQVLSREPLDFFCCFSSSSAILGDFGSCDYAMGNRFQMAFVRHRDKLVSLGLRSGKSLAINWPLWKEGGMHVGTAESTDMYLKSSGQRYLYTEEGLEAFETLLVQPSSQYLVLAGFPSRAKRFLQIDQGERPISGSVNRNVPFSGRRSEMKGFTLEECVSWDVKELAAGLLKIDKNRLTDADNLADFGFDSISLAEFASSLSAHYGIEVTPALFFGHSTLEKVVRYFLTEHKSVMEHVYEEKKPESADQSVFEKAGTEKRKKQRGRNKLNAGTEGSQAADSIAIIGMSGRFPQARTADELWDILFQEKDVVAPVAKKGFTSSKWKLGAVPGADEFDPLFFEISPREAETMDPKQRLLLQEAWRALEDAGYGASHIKQQTIGMFVGAEEGDYHLLTRDKGNVTSHHNGILAARLAYHLNLSGPVMAINTACSSGLVSVHQAVLSLQNKECTTAVAAGVNIMNTPDFFETIDKAGMLSENGKCFAFDKRADGMVPGEAAAAVVLKPLREAEKDGDPIYGVIRASGINYDGKTNGITAPSGVAQTRLLTSVYDRGRINPEDIEYIVTHGTGTKLGDPVEINALYDAFSAYTNEEAFCALTSIKTNIGHTFAASGIVSLISLLQAFSREMIPASLHCSGENRYINWEKSPFYVNKTGKPWPSLPGKNRMGAVSAFGMSGTNAHIVMESYKRSASPHPDAPAYLLTLSAKTKEALQEKIEDMITWAENGGLKENDLAQLSYTLLKGRHHFNHRAAIVVQDADDAVYVWKQAKLNEHHPYVFSGKVPQHFAGRQHIQEHMIEVLGKCSASYSDHRKYQELLCVLADFYCQGYEIEGDLLYGGPLPRIGNLPGYPFARQTYWASDRLQREIGSRNSAEREKLHPLLHANTSTFTAQRFTSVFSGYEPFFADHIVNGKPVLPGAAALEMARAAVTFAAEDLPGGKTGVRLKQIVWLRPVTALSEGVTLHVKLQPEENGDIAFEAYAEGEEPLVFFQGKAVLEETERAPVLDVEAVQARCSGRHLSKAECYEAFDSLGITYGPSHQALDAVYAGSGEVLAKLTLPPSAREEKEPFILHPSMLDAALQASIGLVLSDGSASGRPFLPFALQDMQVFSACRETMWAVLSSADGAYHIELCDENGAVCVRLTGLTARFLEEETEEKPLLLQPKWQESPPDEGGGQEASFRYVTLYGGMNAEDISGAVCAADGEGPIEDRYDACAAELSAIVTRLIKEKQKKKTLIQLLVPDRGEDNVLAGLAAFLKTAHLEHPKLYGQVIQADPDESASALLAKLKENRAHPEQAEIRYEAGKRLVRNWRHLPAPQSGAVPWKDEGVYLLTGGAGGIGLIFAEEIASRVKNAVLVLTGRAEALDEDRSARLRRLEASGARVLYQPVDVTDRAAVIALVRGIQEVHGTLDGIIHGAGVIADNYILNQTENERKTVMAPKVKGLINLDEAAKDVRLDFFILFSSLAGGMGNPGQAGYAAANAFMDVYAARRNRLVRDNRRSGQTLSVNWPLWEEGGMRVDKETERLMYEQTGMRAMRSASGIQALYAAFASGEHQVMVAEGDEKRIRKNLMPETPEPSNRIHVSRKTPVHMPNKVQAELKHMISGILKVKEDEIDAESEMRDYGFDSVSFTQFANELNKTYGLELTPAVFFEYPTVFRFAQYLLTEHPDTFGSQAETEKPVVRKKMKTEPFLIPSRLPKTKTAAAPEPVAIIGISCAFPMAENPEMFWENLAGEKDCISEIPPERWDWRQYYGDPQKDKNASNVKWGGFIDETAQFDPLFFGISPHEAEMMDPQQRLLMMHVWKAIEDAGCSAKSLSGTNTGIFAGTTNSGYAQEASKFHIEIEGSSAAGTVPSIGPNRMSYFLNIHGPSEPIETACSSSLVAVHRAVRAIQAGDCGIAIAGGVNAIVSPDMHISFNKAGMLSEDGRCKTFSDQADGYVRAEGAGMIVLKTLSDAERDGDRIYAVIRGTAENHGGRAASLTSPNPKAQTEVMIKAYQQANIDPRTVSYIEAHGTGTALGDPIEINGLKAAFAALYQKAGVTAPDQPHCAIGSVKTNIGHTELAAGMAGLLKIILQMQHKTLVKSLHCETVNPYISLDGSPFYFVRDTQPWKAATDDSGNELPRRAGVSSFGFGGVNA

SEQ ID NO: 18 - protein, 2118 aa, Bacillus velezensis
DPDESASSLLAKLKENRAHPEQAEIRYEDGKRLVRNWRHLPAPQSGAVPWKDEGVYLLTGGAGGIGLIVAEEIAFRVKNAVLVLTGRAEALDKDRSARLRRLEASGARVLYQPVDVTDRAAVITLVRGIQEEHGTLDGIIHGAGVIADNYILNQTENERKTVMAPKVKGLINLDEAAKDVRLDFFILFSSLAGGMGNPGQAGYAAANAFMDVYAARRNRLVRDNRRSGQTLSVNWPLWEEGGMRVDKETERLMYEQTGMKAMRSASGIQALYAAFASGEHQVMVAEGDEKRIRSHIFDLGEEQSAAGQAPAVADARDLKDQVQEKLKRHVSDLLKVSMKDIEADSELTEYGFDSIIFTEFTNLLNRSYQLELSPTIFFEFPTLRKLSGHLISEWKEAFSGLEGERLKTAPKAGIRKAEAPAAVHVKRETPVSVKGRSEEKTEPIAIIGISGIFPQAKDIDEFWTRLQKGEHCITEIPRDRWDWREYYGDPAADANKTSIKWGGFIDGVAGFDPLFFGISPKEAEMMDPQQRLLMMYVWKAIEDAGYSAKRIAGTKTGIFTGTLGSGYQTLINKAGLPVEGYTMTGIVPSVGPNRMSYFLDIHGPSEPVETACSSSLVAIHRAVKAIETGDCDMAVAGGVNTIVTPEGHIGFQKAGMLSEDGRCKTFSDQADGYVRGEGAGMIVLKKLSEAERDRDHIYGLIRGTAENHGGRSASLTAPNPQAQTDVLKSAYQKAGIHPSTITYIEAHGTGTALGDPIEINALKKAFQTDGAPGGYCGIGSVKTNIGHLELAAGIAGVIKVLMQLKHRTLAKSLHCENINPHIKLKDSPFYIVTETKEWEALRDENGRVLPRRAGVSSFGFGGVNAHIVIEEYMGRSETEQQETREKASSLFVLSAKNKERLKERARLLRDFIQNGSSRDIDLADAAYTLQTGREAMEARLGIIAGSAEELTEKLNAFLLGKNSEDIISGRKKRENNTISMFSDDKDAADLVSAWLEKKKYRKVLRLWANGFDTDWEQLYTDRKPRRISLPSYPFRADRYWVPKREQLPLSNQKTVLLQKTWEPCEAVSSSEPFNNKIALIVSEDTKDLAAEVKKQLNDADIVQENQLISFLQGPNAAIYSGFIDFTGCGSRQKRQDISWVASLQQLIEYGRGLENMKMLYLTKGLEAFKNKAAVMHGIEKAGLYRMLRHEYSQILTCHADIDPEEPLEQTAAFIKQEIESDLTESAVCYRDGMRFSYVLRQTDQIEPEAVQTDRTAFPNDAVLMITGGTRGLGALCAKHFVSAYGVKKLLLTGRKELPPKTEWDLEQTDPVVSEKIQLIRQLESQGVKVCVSAVDLTDKQAVGRLIKEVTSTLGPVGGILHCAGIADRENPAFLRKSKDSIARVLAPKADGLHSLYESVKDDTPAFFVLFSSVSASVPILAAGQSDYAMANSYMDYFAENNESGIISIQWPAWDETGMSRDIKSGIYEQTGLLRHSDAEGLKMLDYILRERPGAVVLPAQVKHDWDAKALENAKPAAHKGMRTASKPPETKKREHNRIDIQSWLRSLLAKELSIDETHMDIDVPFQEYGMDSIFLAQVLTKIDQKLPSVSIDPTVLLEHPTIEQLADYLAVHCPEAFSADATVPAEKVPLQKTPKRSKKTADNPGKRGKVAIIGMACHFPKAGDIKEFWKNLRSGTDAVTEVPPDRWNAGEHYQPGEYQEGKSISKWGGFIHDIDQFDPEYFNISETLAPMIDPLQRQWLEVSAEALADAGYQKEDLWGRRIGVFAGARAGAFHQKFQYLQKDAIIGAGQNFITAHMAHIYNFTGPNLVVDTACSSSLTAIHLAVQAIQNGEAEAAFAGGVDILLDEKPFLTMSAARILSPNGRSKSFDADADGTGIGEGCGVLMLKPLEKAIEDEDKIYGVIDGSAINNDGSTMGVTTPNPRAQQDLIEQAVQSAEIEPDTMTYVETHGTGTLIGDPIELKGLTNVLSAYSDEKQFCGVGSVKSNIGHLLSAAGAAGIIKVLLAIANEELPPTLHCHKPNPRFQFKDSPLYPVLELKRWNGKKEILRAGVSAFGLGGNNAHIIVSNEGIPKERKAAMEPKGGQTVYRKQRYWPEKAQLSEAEENEAGTEAMFEISEV

SEQ ID NO: 19 - protein, 2572 aa, Bacillus velezensis
MAVATDQVKTFLQKISHTNYIVRDHRVHQIRVLPGVTLIDMLYRLAAGYLGERPIELRQIIFKQPVVTSEEFDKHLYVTFTPARDSWKVEITSEKAKNGTPLGGNRDENMECQLYLQEDTPRAKELNIEAFMKNASRKWDMHDIYGIARRSHIEHGEFMKNEGAVYQLQDKEELMELTLSDLAEGFREKFKAHPAFLDASTLAGSSFALSAQKQNDTPYIPFMINRFCMYQPFPKTIYTYSAKNSRTESGVSDSEPDVYSADFTIYDRAGNVLAECEKLTVKRVRQANMITHLIDKEKPPQQNRSGRGESENSVAAEDVSEQQTPEQNMVTYIKSEIARLINRPAQDIDVRKGFYDMGLDSAHLLKLVKILEQTFQQQFYPTLLFEYSSVRRLANYLINEAGCVLKGSAEERHTSDADIDDEVLFFEPAWKDHPLETAVQNGQKHTRHLIIAADAGPRLTGELGTHCPEAEVIELKKEHEVADEQFGADAERIFRMLKRELTDHPKEHTLIQLVCAVENGAALSSALGAMLKTAHLENPALRTQVITFCDKNERLPSDTAAMIRTEADCSHAGCTDIRYKDNMRQIRLFERIEKLDGQTQSPWKQNGVYVITGGLGGLGFLLARHLAEKEKVKLALIGRSPEQSEKISGLKALGAEVLYVQADIGSKAETERAFAQITETFGRLTGIFHCAGVLKDQFIIQKDSSDLKRVFLPKISGLIHADEASRNEPLEFFAVFSSFSALAGNAGQTDYAAANAFMDEYMKYRDCKAEKGERTGASITINWPLWEDGGMQVDSLMKEIMNDATGTSPLPAGEGMASLEYMLRLGKLQSVILYGKEPAVTESMARLVPMADKNRSSLSHAAVKRRSRKQERHTEEHDIAVIGLAGRYPQAGSIEEFYQNLRSGKDCITTMPKDRWKGYPFSYEADQFYRYGGFLDRIDSFDPLFFNLTPRQAEMMDPQARLFLETAWEACEDAGFYQDRTARGPSSQKRKRVGVFAGVFWSHYELFGAEITQRGTPLSMGVTPASVPNIVSHCLNFTGPSMAVDTMCSSSLTSIHLACESIKRGECEFALAGGVNAVTHPHKYAFLANAGFLSSEGVCKSFADGGDGYVPGEGVGAVLLTTVQEAERMGCPIYGVIKGSALNHVGKTSGLTVPDPASQAEVITDSFQSAGIDPETLSYIEAHGTGTSLGDPIEIEGLSRAFRKWTNKKRFCAIGSAKSNIGHLEGAAGIAGLTKVLLQLKHGEIFPSLHADTLNPHIPFPDTPFYVADRLEEWERPSHPDQPRRAGLSSFGASGSNAHFVIEEYLPPQAEKKSVNIREDEPVLFLLSAKNEERLLEYVKRYDRFLREKEVNLKDLAYTLQAGREAMPERLAFIVTSVCGLQAKLKDVLERKTEIEGCFRGRAQDDISSAGMAELLKNKQYSRLLTEWAKGAAVDWSLLYEGEKAKRVSLPVYPFAKERYWVPVPADIRKQTDEPAENQKIILQKDWKQQDPAESEALSGTVMILATDKTSRLADALFKGNGHIETICFIHQAKDGADYYAAASGRNLYGRVRESLQNKQILGVVDITAYDTEYERQEEIEHGKLAFLQQALESLRHSGAVFSQVTHRLQPFKESKPLMQGAKTAGLYRMLGAEYANIHSFTIDSDCAIEHTEELSRQIETEFLQPRAKSVSECCYRLNRRYVPFLKQSMNVSAAPELSYSSDDVLLITGGSRGIGAIAAEHAVSRGCRKLVIMGRELLPDSSEWADMKKDGILPEKAERMQKLAERGAEIRYYSVSLTDQKGLREMTDGIRCTMGPITGVFHCAGAMGEHPAFYNKTETEIESVCTPKVTGLRGLFEAVQNEPLSFFILFSSVSGLIPSLAAGQSDYAMANSFMDSFANHQAGKGNVFVKAVQWPVWKETGMAEGLPETPAYQKSGLSRLSAEDGLKFLDYIILNGQSCGIPCVPEDSEADFGDLLKVKKSEAPMKKSTAGDQKVKDMIRQWVRTVFSEELKMTDEQIKDDMPFDEYGIDSILFAELVQSLQKRISIKLTPSLMLQYQTITEMVDYFAVHHEADFVTKENGFVQDRDVEPDLIADAEERTFMEPKADTEDDIAVVGMSCRFPGAGGTDAFWELLMKGNTAIRPVPATRWHATANAKDYAGWIDDIDMFDAGFFGISEKDAAIMDPQARIILEEAVHSVYDAGYGQKDLSGRKVGVYIGGRAQPSAGMEHILQAPNPILGAGQNYLAANISRFLNVTGPSLVVDTACSSGLIGLSFAKDALLAGRIDAALVGSVSLLLSPSAHRLFGARHILNENGVFHIFDRESAGEVLGEGAGAVFIKRLSDAVRDGDRIYGVIKAVSVNNDGRTLGPGSPNIRAQRDAIQTALDMAEKSPEDIGYIEVNGGGSPIVDSVEIKALSDVYQLNRKTLLPCRIGSVKPNVGHLLLSSGLAGFIRCVLSVYHKRIPPFLSAREPFEHYDFEASRIHFNREPVDWHSEKKPRVAAQSSFPDGGTNAHILVEEYRGERQREHHLAPQPPEFRKKHYPLLGGWNSTENEAEKTSNEKTDIADLLKKYEKKAETSTAPADSFWQVTT

SEQ ID NO: 20 - protein, 2050 aa, Bacillus velezensis
MKKTVNLRLTAEHPIMKHHLVHGESVMPGLAYIDMLYQLAKQSLDLSFRSICLKRVTIYHPLSVKRSERLDVSVIFSKEKEFWTASICGAGSGTVFLSAEVHEGVFSSDKRLDAEEKKQVALPSVSMHTVYEDARSRGLSHDGLMKPEGEIYANEEDCFLDIRQSDSCQENLPGALFHPALMDGAAMASGVLQTAAGAGLFLPIYYDSFIAAETVTERCYAVISKKSGTPSEMVKMDIDFYNLSGAHIASLLGLTAKKVRTDRQLIPGVQQMEETLYRIFSTYVGRPVTRNDAHTVFFELGLESSQLLAIIKDIEGAFDLRLNPTLLFECSSISELLEDIKTKGTEESSGLVADAAPVSETQSVSQTFTFYEHEAFLQDHLVFGKPALMGVVYPCLVLEASGASHSGTYPAELKDIRFTGGPVTLEPGEAAQIDISFAAEKSAERFTASCTVSGKESRKTCAEGEISRYTEAPVKKSYDVEQMKAHAQKVAPDVISRLYDSVAGFTIGPMLKTVTAGYKMSESSFLLQLDLSGKKEKGDLRHFAFDPLILNSCYMSLGEEELQLKKRIHVPLMIERLTLYGPVMSDTAYVVNTIKHKKDGFLSFDAAVLSHTGEQLAELKNASVKEVLQPNRLENASFAPSGNQSRQKTKGKPLDIAIVGISGKYPQADDINAFWENLKQGKDCITEIPKDRWKWEHYFSEDRTAPGAIYSKWGGFIDGIADFDPEFFKISPREAEHLDPQERLFLMHAWMAMEDAGYTRISPELGRQVGVYAGVMYQEYPLFAAEARVKGRHIGLPGGISSIANRVSYFCDFQGPSISVDTMCSGSLTSLYMACRDLRDHRIRAALAGGVNLTVHPNKYFMLSQGQFISSKGHCGSFGAGGDGYIPAEGVGVLLLKRLEDAVQDGDRIYGVIKGAAINHGGRASGYTVPNPKAQSEVISQALQEAGVSPGQISYVEAHGTGTKLGDPIEIRALTDAFGDVPETCLIGSVKSNIGHGESAAGIAAVTKVLLQMKHKQIAPSLHADVLNPNIQFDEGPFSVCRELTDWKRISADGAEQPLRAGVSSFGAGGSNAHIIIEEYEAPVKQAISSQEPAVILLSAKNGERLTEYAERLLAFLQKKHTDKPDLFDVAYTLQAGREAMDERLAFIADSLKELEDKLRSYLENENAPHLYRGRAKRNHETVAVFESDEDLQEAMVKWLKKRKYGHLLNMWVQGVDVDWNLLYSGQKPRRISLPAYPFAKVRCWIQDEAEAVSKRNDGKTVIHPLLHENTSDLWELKFTSVFTGREFFFTDHTVNGEKVLPGAAVIEMARAAVERAAYAVPDGRKGMYLKDLIWMRPVVHKGTDVEVHISLILKGNEDIEFTIYSLSEEPGGERIIYSKGTAVSGEIAAVPSVHLEGWLSGCSQSVMTSDEVYQAFRHAGMIYGPSHQGIDQLMIGERGAAARLSLPESADSTADQFVIHPSLLDAAFQASLGAGSDTAGDTPMLPFSLRQAEIFQPTQKTMWALVRKQSDRSDNGALTLDIDLCDENGAVCMRLTGFSCRAVRQTNQTESKRQEVQTAMLAPVWDKTFFSLEENQAVDQEQLLIIGKPGNTIKAAAKMWPRAHLAETPDHSSEQTLRELTAGYQDIRHFLWIAPDRFAPASVSQEMLDEQENGVIQCFRFIKALLSLGYGNRNISFTAVTRQTQSVYPGDLPQPEHAGVHGLIGSLAKEYPNWDIRLIDAEEGSDSSEMKNIWRLPPDPDGNAAAYRNGAWHKQKTVRVLTSSAPRMSYREGGVYAVIGGAGGIGEAWSKYMITRYKARMIWIGRRPKDQEIQSKIDRLALSGPAPHYIQADAQDAAALKAAVRSVREQYGNITGVIHSAITLADKSMANMDEASFRNAYSAKVNTSVRMIEAFKEEPLDFVLFFSSVNSFTKNAGQSNYAAGCTFQDAFARHIASLLDCEVKVMNWGYWGSLGVVSDPSYRKRMEASGIGSIEPDEAMEALEVLLSEPFSQAAFIKAAPHGLAALTDQDAISVVSGPKPSFMESVKRQNPDRNERLKTLKREMELRI

SEQ ID NO: 21 - protein, 2071 aa, Bacillus velezensis
MNSLLCKLLFYQLQSIGFFSEPVTTPAASMRSVGVIGTYGRWLEESLNLLKENGYIAYDGYTVTLLTDQRPDGRTVWNEWNTHKRLLPNGELAQAELAEATIKAMPSILKGERPATDIVFPDSSMRLVEGVYKHNPVADYFNEVLADSAAAYLKAYLTEHTDARIRLIEVGAGTGGTSAMLFTKLKPFAKQIAEYCYTDVSKAFLMHAEQEYGPDVPYLTTALFNAEEPCESQNIKTGVYDIVIAANVLHATKNIGLTLRRLKALLKYNGMILINEISDRSVFTHLTFGLLDGWWSYEDAELRIPGSPGLYPKSWERVLHSEGYRAVCFPAETAHDLGQQIIAAESDGLVRMQGIRDGRKPYAAPAEVFRKPTQPASRSRAPEEHQAVKADGESVASHVRSVIKTSIADVLKMKEEDIQEELNFSEYGIDSILAVNVINEINKRLNLTLQTTILFDYYHVKLLTGYISEEYETIIASSLETERAKIRPTLQEERPAEKPLQTERKENGYQKPKQERMPPSFAKSDDSGMFRVVIDRPGGIEDLTIARSEVPETKDDEVQIAVRAFSLNFGDLLCVRGLYPTMPPYPFTPGFEASGVVIKTGRHVTSVIPGDEVIVGMGEEFGSQANLITCKEHQVYHKPARLTFEEACALPTVAVTMIDAFRKAGLKKGEKILIQTATGGTGLIAVQMARHIGAEIYATAGSQKKIEYLHSLGVRNTICYLEEDFETEIMRMTGGRGVDVVINTLAGDALQKGMNCLAPGGRYIEIAMTALKSAKSVDLSVLHNNQSFHSVDLRKLSLQNPDQVKDYQLELQRLAEEGVIQPVISKIFSFEDIKEAYHCLDDRGNIGKIVISVSEPYQMTYRPEQKDPADTVKSAAVLHEKEPIAIIGMSGRFAESENLHEFWEHLAAGRDLIKKADRWDVSDSQCQYGSFIEDIECFDPVFFHISGREATYMDPQQRLFLEESWKALEDAGYAGDSVRGRECGVYAGSCGGDYQAIFKQQGPAQAFWGNHNSVTPARIAYHLNLQGPAITVDTACSSSLTAIHLACQGLWTKETEMAVAGGVFIQSTPAFYQSSNKANMLSPTGRCHTFDQSADGFVPGEGVGAVVLKRLSDAVSDGDHVYGVIKGSAMNQDGATNGITAPSALSQERLERHVYDTFHIDPETIQMVEAHGTGTALGDPIEFGALTRAFRRYTDKKGYCAIGSVKTNLGHAAAAAGMAGLFKILLSLKHRQIPASLHFHQANQHIQFADSPFFVNEKLIPWKRNPDAPRRAAISSFGFSGTNAHLVIEEAPQTVRRSPAKPACLIPLSARTERQLEIQAERLLDSLSKNKDSDLGNISYTLLLGRKHLHHRFACIVSSADELKRVLSEWLVKRELPGVFVSNLKDQKPAEEAGMKTFGMECIEQCRSAASPAQYRESLAHIADLFCRGYDLPFTRLFDGGQYYKTPLPAYPFLKERYWAADVNSSLPGQAMKKSETQTVLPSSPQPEHEGLISLTPLTEIEMRAFEPETLQKPIVLQPLDCTVSVQQPEKAVSEDNRTLLEELRTSLADILFLSPEDIDADEPFIDMGLDSIIGVEWIQTVNKTYHTEITANKVYEHPTLEELAEYIAGQIKKPEYAEAEETAVRPQIPEAETPLAGISDGTLRKELKESLADILFLKPEDIDEHEAFIEMGLDSIIGVEWVQSINKTYQASITANLVYEYPTIATLAGYLTGSVQKDTEEVHGEHTKQNDISEETDDQEPPELICLNPNGKGRPIFWFHSALGAVELYQPVAERTGRPFYGIQARGWMTDREPIRGIKKMAEYYVKLIRTVQPRGPYDVGGYSLGGMLAYEVTRQLQLAGETVESIVMLDSFDAAGAREINIPDELFDKNMMLQTVNMALFAPIYQHPERISETLIHRDELDADLHEDIFLEQLIAKAKQRGLTKTDALVKNLIRQNINVQDAYEITDYELLPLPDPNGVTCYYFRNKNGIFLGELDPYFTIRADILSADFVNYWSQWEEHMTNIAIMDVAVSNHMTLLAEDSAAGTISEFCGVLYSADGMTEYSFLQLQEKILNVHGEMLKQPAKTRP

SEQ ID NO: 22 - protein, 384 aa, Bacillus velezensis
MTSLTKIRQQQPYKWYQTMRETSPVHYNEKEDCWEIFTYDEVKRVISDYSHFSSDHKYLSADKQEKMIRHINKDSLLKMDPPEHTVFRKLVNQPFMPKSVESLAPRIAAIADDLLQAVRSKDRMDIIEDYAFPLPIIVIAELLGFPPKDRDIFKSWVDQSQNVKDEKKMNEVQKQMIGYFMQFILQRRKQPQNDLISHLISADLDGEPLSDKQLIGFCGLLIVAGHVTTENVIGNSFLSLKEFPHILPRLLENKALLPDFIEEVIRLRPSIQRVTRYTAVESEIGGKTIPAGEKVYAWIGSANRDEKKFENADQIDLGRKPNQHLSFGQGSHYCLGAPLARLEAKIALSHFFEQMPAWRFTEDQEPNLVPSPVFHGVDRLLVEF

SEQ ID NO: 23 - protein, 415 aa, Bacillus velezensis
MNVGIEAMNVFGGTAYVDVMELAEHRNLDKKRFENLLMKEKVVALPFEDPITFAVNAAKPIIDSLSEEERNQIEMVITCTESGIDFGKSISTYVHDYLQLKRNCRLFEVKQACYSLTAGFQMGVNLILSQTSPGAKALIIGTDISRFLVAEGGDALTEEWSYAEPSAGAGAVALLVSSTPHVFLLDQGASGYYGYEVMDTCRPIPDSEAGDADLSLMSYLDCCEKSFQEYRKRVSGADYKNTFQYLSFHTPFGGMVKGAHRTMMRKLAKAKPQDIEADFQQRVLPGIQYCQRVGNIMGATVFLSLASTIDNGSFETPKRVGCFSYGSGCCSEFYSGVVMPQSRTRQNQFQISRHLDERVRLSMADYDRLLQDSGIVKFGTRNAAPAADIPNAHQGKTRLVLTEIKEFHRKYEWTT

SEQ ID NO: 24 - protein, 248 aa, Bacillus velezensis
MNPMIDVQETEPGIVQVTMQDTAGKNGLSEEFVRELHRVFRDINAHPSYKTVLLTGYGNYFCTGGTQEGLLTIQSGKLQFTDLKLHSLLLDCRIPVISVMQGHAIGAGFTIGLSADFVILSRESFYSCNYMKYGFTPGMGATYIVPEKLGIVLGEEMLFTAANFSGAALEKRGVPFEVLPKKDVLQRGRELARLLADKPRASLVALKTNVTARIKRELTKAVEEEVNMHEATFHLPEVKERISRLYGS

SEQ ID NO: 25 - protein, 768 aa, Bacillus velezensis
MLAYVFPGQGAQFKGMGRDLFDEFSELIKKADHILGYSIKDLCLSDEKERLTDTKYTQPAIYTVSALQYLKGLKEGHTRPDAVAGHSLGEYTALFAAGVFNFETGLRLVAKRGELMSEASEGGMAAVIGLDEHHIKKILQKYELGQIDIANYNTSSQIVIAGAAEEIKRAASFFEKEGAKAYIVLQVGGAFHSRFMESAQREFAEFIEEFHFSELNFPVISNYTARPYKQEDIKRNLIEQITNSVKWTESIRYLMGQGVTLFEEIGPGNILTKLIQTIQRDEEPLTISAPEDSLFFSEGNKDNSESGKEHSLLAENIESGAASPVSRLGDQSFKEDYGLTYAYLAGAMHRGISSAEMLIRLGKKGMLGFFGTAGLPIREIEQALISIKKTLKNGQPYGMNLRFEPDHQDREKELIDLYIKHDVRVIEASSYFSVSVPLIYYKAHQLKIDKSGRVIPHNRIIAKVSRPEVAAAFLSPPPQSIVKRMCQHGMLTEEQAEWLSRIPAADDIIIEADCGSNTEQGSLTAMLPFFVNLRDEMMETHKYARKIRIGAAGGIGTPESAASAFLMGADFIMTGSINQCTVEAETSGFVKEMLSETGICDTAYAPSETLFEFGTKVQVLKKGTLFPVRANKLFQIYQQYESLSEIDEKTKIQLENDYFNKTFDEIYESLIEKQPNLAQKAERNQKYKMLLLFKWYLQRGCLLALEGQEEQKVNFQVHCGPSLGAFNHWVKGTDLESWRNRHVDDIGEKLMNETESLLRRRLDTLFLH

SEQ ID NO: 26 - protein, 4084 aa, Bacillus velezensis
MVHLNKQSADIAIIGVACRFPDADHYHEFWENINSGKDSIREVPIERWDPDLYYSADISIPNKTISKWGGFIHKADHFDHKFFNISPREAKNMDPEQRILLEETWRCIEDSGVSLQDLQRKTTSVFAGIMNSDYRQTGHAESEIDSYACLGSFEAMLSNRLSYTFGLTGKSMSVNAACASSLVALHEAVKSLRTKESDYAIASGVNLNFQPGKYISFSKARMLSPDGKCKTFDAAANGYVPGEGAGVVLLQRLGDAVKAGHHIYGIIKGTAVNHGGKSRSITAPRAEAQCRVISEALHNAAVDAATVSYVEAHGTGTSLGDPIEIEALTKAYRQYTEDTQYCRIGSVKTNIGHTEAAAGMAGLIKVLMMMKHRRVPKSLNVHTVNPIIQFEKTPFRPALDSSDWKAADGAPLRAGISSFGFGGVNSHVIIEEFIHTKDESDRKGRVPFLFSAKSEESMKQMIHHWRTFADDSEEFCKISNEVISSTLLTRTSFDYRAGLLAGSKEEFKNQLKEGLSFRRKQDSEWALAIGDFKWESYKQFAVLKRVFPDLEKNVRPVLKGIPTLHSSFKRKWTPEKIRLYSLVINTEIIKSILASGFKPSLITGAGDGYYVALAAADIIKIEKAISVITGAEKPSHISCEPPSIPFVNPYTSKTYPPVRLNEEYVRMLLNGLSFPADFADRLYGKTRLLLEHQYTFKGFLEEWDKAGKTQEIEILSYIVNRTADKRNALPADEEAAIMAILASMRRLYKRWDLTDYDGFFNNDYVLEILNLLDEGILSKELFLSMLLKKQDGITQAVACINEQPAGFYDKTRFPLMTEYNQMDAVSQEIADHMPLHTEEKGTEPDVDISDFSVFQFGSLPPSAKLNKAAAFEADKPADEALYHSFMQMWLSGEEIEWAKLGDYHKRKAPLPPYPFERSQFSLNPQPVKSDAAFSEKKNQALYTPVWKETAIENEAGSRQVCTILLFSGNKDYFEELKKRENTSAYLIMPGERLEQISDSVFTINRQRPEDYQGVIRLLKEKGAAPDAILHTWSEKQPELEETLESGIYSVFYLTKALISENLINKVTFIYTFSANQKEKLPYFEGVNGFLKSVKQEYPQLHCKTVCFEHDSASVSFSEKADILYKEINTAPDRHIHITYRGCVRYARMLEKQRETNRKTVQYPEKDKVYLITGGFGGIGSKVAEYCAKTERSTIILSGRSVLNGDKQKHLEYLNSFKAKVYYIQANISDKEAVKKMIDGITDQHAGLHGVIHCAGVIRDSLLFRKTKQELSEVIAPKVHGALNLDHATKSLELDFFAVFSSVVSIAGNEGQCDYAYANGFLDHFAEYREQKRQNSLRSGRTLTINWPLWQDIGMGANLSGQGRTSLFHGSGLEELPAEDGTQWFSRIVTSCQLHNIAVCGDHERFEQFMRQRFLTDETETGSAIPLAQGDILDQTVLFLTNIISSEIGAEREEIDQDVHLAEYGMDSVMIHQCNTKLEQSLGAISKTLLFEFHTIRDLADHLVKEYPDRLGRLFSREEKGKQIQSITPARPEQNITAPAAEEKEHLDGIAVIGISGRYPGAENIEELWELLSKERTAITEIPKERWNYETYYDPDPAKAHEGKIYCKWGGFLKNAESFDSLFFQISPREAEAMDPQERIFLETVWKAFEDSGYTIEGLRKQTEKHVGVFAGVTTNSYKLLGERIPTDKNDVLPNSFPWSLANRVSYTFDFTGPSVPVDTACSSSLTAIHMACQSLTKGECSVAVAGGVNLYLHPSDYLYRCQMGMLSKSGKCRSFGEGGDGFVPGEGVGAVILKPLKDAIRDNDTVYAVIKGTAINHGGKTNGYTVPNPAAQADLIQGALKAAGWSARSVSFIEAHGTGTPLGDPIEVRGLTKAFRAYTEDVSYCSLGSIKSNIGHLEAAAGIAGLTKIILQMKYKKIAATLHAERVHPDLYLEETPFCLQQETADWIKPANEKHSDSKYPRRAGLSSFGAGGANAHILVEEYESAADCHTRREESEELIVLSAKHSLSLRESAKQLEEYLQKARHKQGEFLQQAGTNKPLHLSDIAYTLLEGREAMPERLAVISNNIDDLMLKLNHFYNGIDDHEIFRGKKPNHKRRQQQSDLPLKSGGTRLTEMAEFWVSGGNLSWEDFRTGRKPRKIALPTYPFLKNRLWVSNKAQTTSAAGTAPLFDFSAGECRFYKTLSDSEYYVKDHVVHGKTVLPGAAIIEAAREAGERLYGKSVIKLSQVVWAVPITVEKEKTIMIDLLPNQKDGRFVVKTDMQPEAAVHCQGNITTCGDQDASHTERFQLDSWLTGQKRLISGAECYRDFRQSGLDYGTSFQVIKQLFIHENAVLARISLPESIHKKSGTLLEPCLLDGIFQSTTGFTSSQQDDHTAYLPFELGELEILHAPSANGFAYITAADERQHDDVKRFHILFMDENGSVSLKIKNLALKALRAAPQTQDERHSVKYYTDMWKRAPMLHQPEASGLNSCLVISLRRDISEPLIRQAYKDIGLNMIFVRHGGSFQEKEADSFELNSVKLDGYKKLLAILKERQVTIDRVILIGMSPETGIEQNIREKLEEAVLPVFNVTKALLATIPRHKILISHVFFTRENQILPYQMAISGFFRSLHLEHPMLSGKNIEIHSDEIQLQLNTGLPELKNLVKETIISDDTSEIRYRDGIRQVKHSAEIESAEPPEKMEVKEGGVYLITGGTGGLGLIFARHLVRKGRIKLVLIGRSELSEEAVSNVKELEKNGSEVFYVRTDISDKENVNNLIKLVKNKLGPVKGIIHSAGVIKDSLLINKREEDLDSVLASKVYGTIWLDRYTDREPLDFFVMFSSISAIIGNAGQTDYAYANRFMDYFAEMRAAENKPGKTVSINWPLWKEGGMQIDIHSEKFLYDRFGMLPLVKREGLAAFDQAMTGCEHQIMVFSGNELKLERMITIDSGKSDPAIADENHEPKELSITESLKSTLTRIITGVLKIEEREFDFELPISEYGFDSIMFTMLGNELNETLGISMMPSDFFGLTDFNELLEFLKSEYSEELHLCGSFSSDESAAKDRRENLIEGIAKMMSSILKIDRKEIEEETSFGEYGFDSITFTRLGNEINQQYGTELLPSIFFECNSLAEMTDYVIEQYGEILFAETESFSAADEKTLYSTPPPESYEHSPEPENKTRQEERHMNEPVAIVGISGRFPQTDTLEDFWEGIEKGRDMITDIPEDRWNWKEFDGDPIRDVNRTKIKKGGFIKGADSFDPLFFGISPAEAELMDPQQRIFMETVWKTIEDAGYKPSDLAGTKTAVFAGVATTDYAERLNENGVSVQAQTATGLNHCILANRISYQLNLTGPSEPIDTACSSSLVALHRAAEGIQRGDFEMAIAGGVHIMTSPTLFIAFDKAGMLSKDGKCKTFDKSADGYVRSEGAAAVLLKPLSKAQADGDHIYGLIKGSAVNHGGRANSLTAPNPNAQADLLTEAWRKAGVSPATAGYIEAHGTGTSLGDPIEVNSIIKAFKTLYQEWDIPFAKQKCCGIGSVKTNIGHLETAAGIAGVMKVLLAFKYRKLPGLAHFSELNPYIKLENTPFYITETAQKWNPIKDKENNDLPRRAGVSSFGFGGVNAHIVLEEYREPQKEMPENNGNTHIFVLSAKTKDQLLEYIRLMLQYLDRVIAGDMTVNASDMEFTLQNGREAMNERIAVCAASLTELRDKYVSFLDDSKVQKGVFISENTEEPTAVSEYMIEEALQSGKEELLAQWWANGAEFEWKTIGNKKLNRVPLPTYPFAKESYWFTPKKNKSEVNSKSLHPLISENVSTLKKQAFKTVISGTEFFVTDHLVSGDYVLPGAASLEMALVCAEISGESKVSKIKDVMWNRPILYKGKTLHIYTDLEMKQDKLNVTICKEGPDGVQQICTQSETVFGDINSNAEYVDIDKFKRSSKAVINREECYHRFSRMGLTYHSGFQTLKAVYRGDMELMAELELPAHLANGFSHFTLHPSLIDGGFQAAAFLLRDNEKDGLFVPYSLRELHIKRTLTARCHVSVRETGFYTYNIDFINESGEIAVSMKDFSVRKVTGGELTAGRKNEDQEILFLLEQLKNGELSADQVYQLLEGK

SEQ ID NO: 27 - protein, 1590 aa, Bacillus velezensis
MQIKQILSLIEEQQMSPDAGLELIRTYRKEQMEKKAEPESQAPSPTIFFKNDWVRTNNIDMPNQQAPGNMLIFDQDNRLFQHAEMMNGDHNRVILVTPDSDYRIERNRCTINPSDENHVEMLLSDLAENGFTPDVVLYLWNGEIREFTEKSVNETLRRGINSLFLLSKALMRRNEPVTLLHIYWTSGLNQPFHEAVGGFMKTVNMESSKLKAKSIQIRHEDSDKNPPVSEMWDAAISEIQRFQTDECEILIDSYTRYVKGLQHIDIPEHANGSVTYQKGGIYIITGGAGKLGLLFAEHIAKENQAVIILTGRSFLTADQKERISKLNESGSIVEYQRTDITDRTEAERFIFGVKQRYGSINGIIHAAGILRDSFLVNKSLSDFTDVLKPKVYGTIWLDELTKDEDLDFFVLFSSFSAYGNAGQSDYAYANHFMDSFAVLRSQLSRNGKTLSINWPLLKDGGMSLDSSGINQIKEKYGMTPMRTSSVLEAFLKMLRSSFTSLMPAEGKRDKMIKALSIQRNTAAADQDTLTAEHDEEEEHAAKEKVNDYLIKIISGVLKIQAHKINAKDSFEKFGINSLMIMSLISKLEDTFGDLPKTIFFEYQNIEELSNFFLTSFKEKVLKAAGAAPVTRVPKKRENLSKKQHRQQKDTSAPSMVQPGEDIAIIGVSGRYPNSDTLEEFWENIAGGKNCIIEIPEERWDFRANYSPDRMEKGKINSKWGGFISGVDQFDPLFFHISHKEAELMDPQERIFLETSWHTFEDSGYTKEKLDGMKAGVFVGAMYGQYQLFGAEETARGNPIALSSFFSSIANRVSYFFNLSGPSIALDTMCSSSLTAIHLACESIKRGESEIALAGGVNVSIHPSKYLWLSQGNFVSTEGLCRSFGEGGDGYVPGEGSGAVLLKPLEKAIADQDHIYGVIKGTSVNHGGKTNGFTVPNPNAQAELIAENFKKSGISPRSVSYLEAHGTGTSLGDPIEIAGLTKAFEKFTDDKQFCAIGSVKSNIGHLESAAGIAALTKVLLQFKHQKLAPSIHSEQLNQNIRFEKTPFYVQQKEEEWRKESGASRRRAAISSFGAGGANAHVIVEEYQNHADTQTISGPFAAVLSAKNEDRLKEYARRLLQFTERETKASAADIAFTLQTCREPMEDRLAVVASDLPGLKEKLRTFCTEGTIGEGVYKGNVTKDFDKVFIFHDQKMKDKFLEAMMETKDLNLLAKLWSFGADIQWRELYEEYTPQKVKLPLYPFAEESYWVPRNQSATFPEILPRQSSLHPLLDSNESTLEQQFFKTTLREKEIWLKDHIVKNKSILPAAAFLEMACAAGTRSYRKKKVTRLKNVIFARPAMLLKESLTIYTHISVKDGSILFNMSPDEDAAVRTGFVTGELDYDHHYSDDDIENIDRQEMINRSAFVREQDECYEYFRENGFLYGRAFQPIQRLWGGKTEAVAQLLLPKEAAYALENYTLHPSLIDGALQSLFGITDGREEASVYVPFSIGEITVRKKVSAECWAYARKTGQKGQSELIYDIQLLNEQGERLAGLKDVTIRKKETFSAEAQTRATADSNGKNERVKELLRQLKAGELTAEEADYALERMQD

SEQ ID NO: 28 - protein, 2902 aa, Bacillus velezensis
MKEARHIRKKVLSDIESGIISLEEGVKRIQQLGSHSAGGNGQAIYYQTVWQRTDLSIHVKGGRREGSLLLFDKNEDVSKELAALHDTRVILVKPGKEFRKTGDGVFEIDPRSERDYINLLGWLIEEEKSDIREAVHLWSDMPFEKTERAIREQCDSGVYSLFLLQQALFKNNCRKPIKLLYGYFSHLSGEQPLYAAASGFLRTLQLENPLISAKSIEMEQSIAAVHAADIIRNELSDFQPSDVEIRYKDMQRYVKQLKMYEPEKNSGSGDVPLRENGVYIIAGGAGGLGFTFAEYLAFQTKCCLVLTGRSPLSDHIRKQLRRLEDAGSSAVYVQADITNKEEAEYVVKKAKTSYGKVNGVIQGAGIIRDSFLLNKSREEFDQVIRPKVLGTMWLNDAVEKENPDFFICFSSTSAVLGNVGQSDYAFGNSYMDHFMNMRSAQDSDTISLSLNWPLWKEVGMQVDERTVETMKKAGFYPLEKEEGKEAFAVALSSGFSQFTVFYGDEQIDNHVQQLYERKDNIQADEGTGRNIESFDSEKLKAETSDFIIKVIAAEFRMPADKIDAEEALEKYGLDSVMIINMTNELEKHFGALSKTLLFEYQTAEELSQYFVEEHRDTLLHKLRLGENGSSTPSQKKKDHEQTAEVNGKQKIQMKNQVQQEKYHDNDIAIIGISGRYPMANDLDTLWENLLNGKDCITEIPEDRWDSGLHYQPAAGDEVKNQSKWGGFIDDVYHFDPLFFNISPAEAELIDPQERLFLETVWHTIEDAGYAKKTLERKNVGVFAGVMYGHYQLYSVGHEAAVSSSYASIANRVSYFFNFSGPSIALDTMCSSSLTAVHFACESLIRNECEIAIAGGVNLSIHPHKYELLTQGGFLSSDGRCRSFGSGGDGYVPGEGTGAVLLKPVKKAIADGDQIYSVIKATAINHGAKTNGYTVPNPKAQSEVITRALKKGFIDPKSISYIEAHGTGTALGDPIEITGLTRAFSDAERDKKTCAIGSIKSNIGHLEAAAGIAGITKVILQMKHKTIVPSLTHSAELNENIPFQKTPFYVPDSAEKWESSVPRRAGISSFGAGGANAHVILEEFADEAISPLAAEEPEQLLFVFSAKNADRLAEYAKRAKEHIAARDYPLETLRNTAFTLQTGREEMPHRLAVIASTRDELLKGLTDYTLGNATDHIFTSGKDTTEAQRMNKVEIEEAAANRDLLKIAEYWVGGNGVDWPSLYKDATLRRVSAPGYPFAKELCRIDAQNMGSRRMNVNNDLHPYISCNISDFKAQKFLINVSDTGLYIKTKYQDKEMFPFLSQIEMARAAGAMASGNPIIKLTELSFREPMLQSGSNEQIRIVLTPDNQGASYSIEKQSDSSIYSSGRLELEGGAYENGNIHLEPFLSQRADPIPYEAFYQRLAEFGYSCSDSLKAAEHCVSRNGQVLLKIKAKAGPKGCIIKPEVIESVYQAVIYLAGENAGELPENIKECTIFDHETEPVYVYAEQTGESDSAYDVYVLDNAGGILMELSGLVFGEKPNKNVRFYEHKWDQKNPLIEIKDREPKTILVFAKDEALAGALKNQSDSRVILVTPDQRQIDQDLLTFCVNPEVTSDYIRLFEELEKKGFSPDVILHTGETFYAGDHLLSGLESIFYLLKALSARSDASLYLHSLLLVHSFKEGVNDPYTGALAGCLKTANMLVPSAENVKSIGFSERISIEKMAEFCLNEMVSGVERQAEEVKYINDKRYVKTLKDYVFNHTEHSHQLKQEGIYLITGGLGGLGLIFAKYLASQYQAKLVLTGRSPLTADKRHNIDRLQALGGDAVYYQADAADQKTMGRVIEETKRTWGSIQGVIHSAGHADDRLFTEMNLTDFSDGMTAKIEGTVCLDELTKDEPLDFFIVFSSISSVFGDFGQVNYALGNYFQDQYINWRSEQSRRQERQGKSISINWPLWRKGGMHLNKEAEEAYLSASGFDYLETEEGIAAFETILASDCPQISVVTGDADTTPARKDLPHQKVNTLQVRQEEISYTAPAYTDNVLGELKQMVSELLKINIGQLDTAENFGNLGFDSISLKTLAVRLNKKYKLKLTPAVFFTYSHIKSLSEFLNSELRTVAKGNTDAEKNISEKRKVVHAGKTTGKTVKPPRSFPFEKKTTRQADHHPEKQPVAIIGMSCVFPGSKNADEFWINLINEKDLIQEIPPDRWDWKKYAEGKGSSEVHSKWGGFITDADKFDEAFFNINPREAELMDPQHRIYLQETWKAIEDAGYKASKLSGKNIGVFTGIQFNDYRQLLMRHSDGAHAFAGTGNSQALISNRVSHYFNFRGPSESIDTACSSSLVAIHRAVRSIQNGESELAVAGGVSLLLDPVTHMYTDKLGILSRDGRCKTFDKLADGYVRGEGAAVLLLKPLQAAMNDRDNIYGVLRGTGENHGGRSASLTAPNPEAQAELLTSVYKNADIPVDTISYIEAHGTGTELGDPIEIEGLKKAFGSFEPHSGKNHDQYCGIGSVKTNIGHLEPASGMPGLIKVLLSMKYKTLPATLHVNELNPYIQLSGTPFHIVNKTMKWARLIDRKGNEIPRRAGVSSFGFGGANAHVIVEEFEYGQDKAVTAEREQIIVLSAKTKERLMVKAKELTMFLHEELSVQFSQQEVQERDLQEAVREAAAGILRLDTADIDAKTPLSEFGFDPLAYSELISFINQMYGTEISLDIFQELNTLSELCRYISSIRNRSADKPYNGNFREKSGFGLEEIAYTLQTGREPFECRLAITCSNIGDLLEKLNGYIQGSRLQGVYEGNVTDFDSLYAPLFGGPEGHAYVQSLIQQNKPAKLAQLWTIGCEISWEDLYEEELKPVKLSLPLYPFSKNRHWIHLNKDEAQKAEALSNTELHNSNKDTADGEIMSLLEKAQTGEMNTKETSELIEELLFHE

SEQ ID NO: 29 - protein, 2334 aa, Bacillus velezensis
MNEKTMQIEQIVKKVKECNLTPEEGLELIKSLGKTHLYEMVWDRYEFKGSKKFPHTKEPILFFCEDDSMYTVMKRQLEGYEAPFIYVTSGERFEDCRNGRFTMNFAKDEDYDALCGVLRSQNIRPRHIIHFLAAGLFKNTEDAMRKQLNKSLYSLFQMFQAFMANKLCPKAEILYLYENAEGEVQPIYNAVESFLKTVQAENPNFTCKAAELKSMFDEPFTKQHIADVISFEWNNQCKTDRFTCYEPRHYYKRQLQRVKKEVGEKHSFSVKKNGVYLITGGAGGLGYLFAEYLAKQAEVKLILTGRSPASRETAQKLSALENLGAEALYVPADISKEKETDALIKHIKQTFGELNGILHSAGLVKDAFIIKKTKESIEEVIAPKVFGTVWLDKAAEEEPLDFFVMFSSLSAVLPNAGQSDYAFANGCMDGFTQYRSIKGRPGKTLSINWPLWDAGNMTVGPGELQALRHAGLELLSAQAGLAAFQDSMSRSASQLAVISGDKDRISELLSTDHKKIETVPENNSNLPQLHEKDLKKQTVRLLTEIVGAETGRPADSILPEDTFDRYGIDSLTILGLNSRLEKYFGRVSKTLFFEYSSVEELSEYFLEHYQHELQKAFLPAAEQRIDHSTPAKREKLSVSRIPSAPSEEDIAIIGIAGRYPMAKDVEEFWENISSGKDCITEIPKERWDFRKYYHTGDNARHDSKWGGFIKDADKFDPLFFSISPRDAELIDPQERLFLETAWHTFEDAGYTKKKLKRHKTGVFVGVTYSHYQLFAAGASDDEERQALLSSYSSIANRVSYFFDLHGPSLAIDTMCSSSLSAVHFACESIKRGESTLAIAGGVNLSLHPDKYTLLSQNHFVSSDGRCRSFGAGGDGYVPGEGVGAVLLKSLSAAKADGDRIYGVIKGTSVNHGGKTNGYTVPNPGEQANVISETLDKAGIDADSISYIEAHGTGTSLGDPIEISGLTKALHSSKSDYRCAIGSVKSNIGHLEAAAGIASITKVLMQMKYKQLAPSLHSDNLNPNIDFEETPFYVQSELTDWETPQNQARRSGISSFGAGGSNAHIIIEEYKNEEKMETVKSNKTQIILLSAKNEERLRLLIDAYINELGPKTSLADAAYTSQTGRNAMEERLAVEASSIDDLRNKLTMYLRSDHKLNGLYRGKARRDAGQKDALSAARFKSAREMAIHWVNGGDVQWEEMYTAELPKLISLPAYPFERNRYWVPAAKAAQKQKKTGVPQSLPHAPTDLSFDVLKKAWKKQKAAPSAFTKGQVMILANSESERLAFELFDSDPLIESAVICADNWDHSDGEAKKTALAVIEENPEIIGMIDLSDLRSDQNGARTGTIGKLTLLQEIIKTRKQLFVLHVTRGLQTFLNDKPSLAGAETAGLYKMLSAEYQKIKSKTIDVDGHVGTAAELRQVITDEAYADGLYSEICYRNGERYIPYVEKLHAAEINRKLSGLPVCRTDQTLVITGGTRGIGAELARHYAGKGVKKLVLMGVTDLPESDKIAGLLKDTDEKSPLYSKLQLLHELDQKGVQVEVYSGPLTEKEKLQRFFSEVRLKFGKIGGVIHCAGAANHSNPAFIHKSDQEIREVFEPKVQGMQVLHDIFIDDKLDFFILFSSVASAFPLLGAGTSDYAAANAFMDYFAAYQHAAGRTYYQSINWPSWKDIGMGEVTSPSYQALGLLSHSTETGIAMLDEMMTINGYPCLIPAKTHPEKFKLEQLLQTRIQAAKNNPDAEEKEISGQGDNEAMIRKLMEIFSAELKIPYENLDQDTSFTDYGVDSILLVQLVKKAEDAFQIKIEPSAFLEYPSFSQLGVYLNELFASEGISPQIDSENIEVRKKEQHINQNASEVRDSGSQIQQTSLNQIAIIGMGCEFPEAPDTETFWTNLKKGQNSVREVPASRWDISSYYSDTYEKGKSISKWGGFLQDIESFDPAFFNMNKSEASELDPLIKKCLEVSVQTLRDGGYTKEEVSNKEVGVFIGSRTGTFMSKIGSPSKNTIVGIGQNFIGAHISHFFNLKGPNLVVDTACSSSLVSVHLACQSLMSKESDMAIAGGVDILLDQKPYVMLSEARALSPEGKCHTFDEKADGFVPGEGCGAVLLKRLDDALAEGDRIYAVIDSSAVNNDGQTMGMTTPNPKAQSAVIKKALKKGGIDADTLSYVETHGTGTMIGDPIELKALTEVFREVTEERQFCGVGSVKTNFGHLMSAAGIASIIKVALSIKNQMLPPTLHCKTPNPRFKFDQSPFFPNTSLKEWRPRKGVLRAGISSFGFGGTNAHMILSDSHLTLGYGETKRHPLSPVIFNKEQCWIDNGETPEKEESELLIPLLDFKEL

SEQ ID NO: 30 - protein, 1903 aa, Bacillus velezensis
MASNQNYQFTLTIKHTDYIVRDHRVHGTRIIPGVTFLDMIYRMALSKGLPIEELECQNILYLEPVATSDTFDREIRIRFQGLEQGWEIQAKSRKVKDDRILDESWDENMTCRLMQKFPESMSSINIDEIKHASAREDDMEICYDYLKKVDIEHFEFMKSLGKVYASDHSVLAELTLSQIANQYTGYFQLHPTFLDASTIISILYQACPEYFTQGSPASRMKTYIPIHIESFRMTKRLEDRCYVYIEKQDQNHDSGDVIQVSYGLYDAYGEMIAYFTRLSVKHIRSKDLIENLKQTRLETEAASQPKDSLIRKDSIINRSESIETHLKELISGVSNIDLRDIRTDIGFYEQGLDSASLLAIVKELENKTGEQLYPTLLFEQKTIRELAAYIKENQRMSSYFLTRNQPAEKPDMKKSKNENLSALITEGDIQQLIADIKGTAPETLSVVKGFYEQGLDSVTLMQAVKALEEKTGRELYPTLLFEYPTIQKLANYFAESGEKTSVEKDLPLHYGENHTALTYLTPHWRQKAAAWDPNCGNKKKRTCLLFQYDRELFHFMRENAENGFENTQIILVLSGNRFSYHGDGVYEIDHREEAHFDRLAADLKKRGQMPDTVVYGWPEGSFAGPERISEQLSKGAYPLFFFSRALMRSKAEKKVVSLFLYPADHKNDQPLYASVHGAGQSIVLENPKLALKTIGISVSDKSSLPELTAEIIRVESTEAHPGETDLYYEGNVRWVRALREAEPAPNSDFSFKENGVYMITGGAGGLGLIFAEHIAAQTKANIILAGRSELTEDKKNKISRMKAGGSSVQYIRGDFSDSRDAERIIKTIKRQFGEINGVLHSAGVTHDALLIQKSKDEIQEVIAPKINGTVLLDSLLQTEPLDFFVMFSSSTSMYGNIGQTDYALANRFIDLFAEWREGMRRKKERSGVSVAISWPLWEDGGMKVDKQTEKWMKQKIGMVPLSKTNGIKAFQDSLSLNASQLIVFEGDKEKLESALQDTFIEDESREIQINETADTRHEDIAIIGLSGKYPMAEDLPEFWENLKSGKDCITEIPPDRWNMDDFFSEDRDMKGKSYSKWGGFISGADQFDPLFFHISPREAELMDPQERLFLETAKHCFEDSGYPRNMLEKMKVGVFVGAMWGQYQLFEGEENGVAFSPASVYSSIANRVSYYFHLKGPSLALDTMCSSSLTSIHYACQSIHCGESDMALAGGVNLSIHPNKYKFLSMGQFLSSDGRCRSFGKDGSGYVPGEGVGAVLLKPLKKAIEDQDQIYGVIKGSAVNHGGKTSGYSIPNPDAQAEVISEALRKADIDPNTVNYIEAHGTGTSLGDPIEIQGLKDSYQLNHPCAIGSVKSNIGHLESAAGIAAVTKVLLQMKNKQLVPSLHSDIVNPFIDFDQVPFQVQRKAAEWNIPQNSNAVHPLRAGVSAFGAGGTNAHLILEAYEPPKAFDHQSGRVIFVLSAQDKQRLIKYAKVMADFLSENESKDNNHKLRLQDIAYTLQTGRDHMEERLAIVADSGRVIAEELSAYIRGEKSSLSYTGNTFESEVHNEMPHVCSDYAEAASKWVNGRKIDWETFEVNRNARRISIPGQPLIKQRYWIAEKGEALVSADVSKPGHPFLGSNTSDFNQFSFTKKITRNHPFALSLSEGNVSFFPYASLAEMAIVNAAAAFGQPVQTLTDLLWTESMNGITDIRELMITLTPERDFARFDIYANTKNENKVRLARGNAHIVKPESGMFPEALDIAEVKSKMTEHPAEAPFVIESAKNSDGMLSLHSLPDELYAKRENFTISPEALESAIQASAFFVSGETFPELIGMGAADVYHPLAQNFYVYTQKENRQNSRDVTCHMTFTDKNGSILAECRDVRFRYGHEKDTVQTDDELIRLLRQLETNDIDQKAVLKQLMGEE

SEQ ID NO: 31 - protein, 2460 aa, Bacillus velezensis
MNGKREQLSDILDLIQTGQMSADEGYARVTSIQNQKSRASNHPLLYYKPEWTESFIPSKKSVPLMGLLLIFAENERQIQELSGLFKDCTLLFVIRGKEFAVLHDDTICMNHVKKDDYLKLFRYIHDHFQLPEKILHLWSDSQADMSKKGIQKQLENGLFSLLYITQALIELKWKKIIKLTHIFQTENKEQLPLHHALGGLVKTVHQEHPNFHYQIINITQSEGAGAALPAIADIYQRECDEKRDIHFEVRYENGRRFTKSYNKAGSFDLTQPLKHHGNYLITGGLGGLGYILAKHLSEKWKANLILTGRSDLTEEQEKKIEYLRSSGSTVEYIRSDVSKQSDAERMFAFAKEQFGTLHGVFHSAGVLRDSFILRKTKEEIDQVTGSKVYGTLWLAEEIKKMKVELLVLFSSTSAVFGSAGQCDYAFANACLDQYAAVMTAKESAERIVSVNWPLWTSGGMNIDDEGISYMKQELGLDPLDDGDGIQALENSLCQSSEQLIALKGRKEKIEDVLKRAGTISLHSDQQEDADLQNDELRQNIISYLKNIMSEELKLPVSLIDEKQYLEKYGIDSVMIMRLTKKLEQSIGRLSKTLFFEYHSISQLAEYFLSHHSERMMKLLKPAGTSELVSYQKKQKRKPVETKAPVRSEGEGSKEHIAADPLSADIAIIGVSGRYPGAENIREFQNVLMNGRDCVSEIPDDRKEMLEGSCYKWGGFLKNPDRFDPLFFRISPKEAAFLDPQERLFLETVYNTIEDAGYKPSDLTRKKVGVFAGVTYGSYQFFGVEESLKGNELAVGSPFSAIANRISYFFNFKGPSMAVDTMCSSSLNAIHLACESIRRGESTLAVAGGVNLTLHPNKYTLLNQSRFFASDGRCRTFGEGGDGYVPGEGVGSVLLKPAAEAVRDGDHIYALIKATAVNHGGRTNGFTVPNPNGQSELIQDALQKACIDPRTISYIEAHGTGTSLGDPIEITGLTKAFREFTEHTQYCSIGSVKSNIGHLEAAAGIAGLTKVLLQMKLKKLFPSIHAETLNPNIDFKASPFYVQRSLQDWKKPKFQENGKTVTVPRRAGISSFGAGGTNVHIIIEEYEETNVSTEHVENEPHIVLLSAKDNERLLEYAENMRDFIQRSLSPEVKDKQPDMREKVYEVLKPFVSELLHIHPEEINIADHLSEFGVGPLELSRMADFINEMFHIELTMYELTDCPSIQAVTEYLLKEYAGAIRNLFPNEVMEGSQSESVVLRDLAYTTQSGREAMEARAAITGTSLKEIKDKLFEFCRGDKQVPGVYVHQQSADAFAEKMKALTEGRAGELFVKTIIENGEAEKLAQLWVWGADIDWKSVHQHLQQPGKRISIPTYPFAKERYWVPSRTEKTEIPQHSFQHHLQKKWRENPFVNPSETKEYGLTVAFVNQDTESIARTICSDIDQENLIVIKHHSSFIKHSDQMFECSLLDENHAYAVIREIFSGGERQVENIFDFSDIGNQSDNQNGIPYGKFLFIQEIIKRSKKETPLSILQITNGLQVFKAEKPKLTGAESAAFLKALSAEYGFVHVKTIDIDSMKETHELKQIFENERAQCTGENEVCYRSGVRYVPYFEEERIHTGGPVSFPADKAIVITGGTGGIGRAIAEDLVKRGVKKLVLTGTRPLPLRSEWDHLLKEGRQDEKTVSNIKLFQSFEEKGVNYMYYSGSLTNEEKLRSFFHQVSLEFKDISGVIHCAGLHSGGNPAFIHKRMSEFKTVYGPKVTGLQNLKRIFNNRPLDFFILFSSIAAQSPKLSKGMTDYASANAYMDYFAAYHFQKGRTYFTSINWPSWKEVGMGTVTSPLYDELGLDSLSTREGLAILYHALERKSANIIPIVKKGTVFHADSLLNINKTGGASVPVRRQETPDTFDHSEGLVSELSAVFAEELSIPLEKLNPNTDFQEYGVDSILLVSIIHRIEAMIQKKIDPTVLLEHNTIHGLAEYIGKTAPPLKKQVEQTDSQSSNQQDMQSVTSRNTEPQTASSAKIAVIGIGCKFPGAADKEEFWDNLRKGKNHIKEVPDSRWNIEENYSPVQQKGKSISKWGGFINGIGSFDPEYFRMEEEKAIQTDPLIRHFLETSVQTVRDAGYEETELSGKKVGVFVGSRMGGYGHKLPKESSSHIVGLSQNFIASHVSHFFNFHGPSMVSDTACSSSLVSIHLACQSIKNGDSEMALAGGADLLLDEIPYLMLTEGGALSPDGQCFTFDERANGFVPGEGFGAVLLKPLEKAKADGDQIYGIIEASAINNDGATMGITTPNPKLQEQVIQDAFEKADITPGSVSYVETHGTGTMIGDPIELQALTKVFRRDTNKTQFCGVGSVKTNIGHLLSAAGAASFIKVILSIWHKEIPPTLNCETPNPRFEFEKSPFYPNTELRNWKDGKRRAGISAFGFGGTNAHLLVSGLDDSYHSVRTPLPPAEFVRKEYWPDSNRKKQIKQNKKRLLEIIDETE

SEQ ID NO: 32 - protein, 1283 aa, Bacillus velezensis
MRFSVLVKHDDYIVSDHVLHQVRTIPGVTYLDLITRFLAEKGISPRSFEIKHVLFREPVATSVHFDKKVTFQFTEQENGWLVETTSRKWVAEKAEGEASVNLQAEIIRKNAINEKTISIEELKKGAVRTSDAESAYRNLRRGGLIHKDFMKLEGTVYEGENYILGEVSLSGLSKEYTDDFYMHPAFLDGSLSLLGILTSDLPDEGTNAFIPIYIETFRALHKTTGSCFVYINKTSITQPPSKDILYADIEVYRPDGELAFYYERFGVKRVRNEKSIQRLEHSQKAKEVGSATNNKEMIRNNLIQEIAGMIEKPAETVKNDSSFYEMGLDSKQLLDLSKKLELMLDTKLYPTLLFDYSTIGELTEYLQEKYGADITDSISDTVQHQDSHKTLTDELSSIIGEATNTPSNKADKHQSFYELGLDSKQLLHISKMLEERLDTQLYPTLLFDYNNIHDLAAYLEEKYDVRNTPAAAFKEKTQTKEPPEKPMLDSLYLQKEWIESPLKSGEVPKENTLIFDFDSSLSDEIRKYIGSENVIYAEAAAEYEIVNEKHYKFNPEQSAHYTRLLEDMKKSGAFPASIIHYLSKKAYTEAALDLTHSFYSILYLSKALIHQKVKENINILYVHDKGQYTNPVYAAIGGFFKTLNAEQPNIKCKTVEISPRQTIEKAPLLLNELSAGHHQSVKYDGDQKRRVTAYKDASPQTGQKAAKFAKNGVYLIIGGLSGIGWIISAFLYANHGASVIIAGRSKMTADMEEKLDSIRYDGASISYIQADMSDKQQVINLAEKIHADYSEINGVIYSAGVLKDSLIMNKTDEEAQAVLQSKVNGVIHLDEALRNMPLDFFVLFSSISSEIGSLGQADYAYANRFLEHFAEWRECMRKAGGRSGKTIAVNWPFWKDGGMSVDPGIQDIMKTEYGLHPLENTAGIKAFEHSLLGQGHQLIVLYGEKEKIQNDFKPLSARSAPPLVRDSAIAADFDASSVVTGEAESPFRILGTASNRHLDDYLHYWSRLKKGALQHDQSDAAKKLIAFYQTEETETVHFLANTENARHMEILMSGKGETILLICGFATTAYMWKEQMKEWADQFNVIVIHTPGYGLSEGSADFTLSGLAQTFIEVLNEIGVAWPIHIAAASWGGMIGQRIAYEYPEKVKTLILSGSYTAYEEDPESSVEEKLKNDFIAIGKSHEYESLYSNQFLNASIERFMKIHQQEGYSTIGFLKDIHTRTLILTGEKESVVDQKETKRLQNLLSNAELKKIKGAGHLPNITHPEEFNKAVSEFIKKSVSKG

SEQ ID NO: 33 - protein, 363 aa, Bacillus velezensis
MKQTISNPAFDMKQINALNGHYQTMIDNGDLQCASYMMSRGGEVFAAESLGEFTGGQKEKQTFQLDTIREIGSLTKVFTAVAVMQLVEKGLLDLKMPVKLILPAFDKPGFGEIKILHLLTHTAGLSFELDIQKAEGIDLTNEEEWINYLVSTPLEYGVDEAWNYSRTGFVILGIIISKVTGVSYEQYVTKHIIEALGLDRTYFYVPDALKEEVCVINEHECVQLEKSHHPYFPNKATSGLYSSLRDIWKLAEMFRNKGRLKDKKLLGRKTVEAMLRNQIKPGLPFYFFGAPREEGGFGLGINLWPAGDHYFMTEGTFSHLGMGWCGMFSDPAEDFTYVFFTPISEFHPHAVLTPLNIVWAGIE

SEQ ID NO: 34 - protein, 371 aa, Bacillus velezensis
MAAKTKTSIVDSKKQFDAINKQFETFQILNAEGEVVNKDAMPDLSDDQLKELMRRMVYIRILDQRSISLSRQGRLGFYAPTAGQEASQIASHFALEQDDFILPGYRDVPQLIWHGLPLHQAFLFSRGHFKGNQMPEGVNALSPQIIIGAQIIQTAGVALGLKKRGKKAVAITYTGDGGASQGDFYEGMNFAGAFKAPAIFVVQNNRYAISTPVEKQSSAQTIAQKAVAVGITGVQVDGMDALAVYAATAEARQRAINGEGPTLIETLTFRYGPHTMSGDDPTKYRTKEIENEWEQKDPLVRFRKFLENKGLWSEEEENKVIEQAKEEIKQAIKKADGESKPKVTELIENMFEEPTFNLKEQLEIYKAKESK

SEQ ID NO: 35 - protein, 225 aa, Bacillus velezensis
MDHTYEVHQIKTYHQMWSNYCYIIADRSKKSAIAVDPSWEIDKITDKLHELDVDLSAILLTHSHYDHVNLAEPLQQIYHSDIYMSSAEIDFYQFRCRNLIALEDGQTFAAGGFIIRSILTPGHTAGGMCYLLSDHLFTGDTVFTEGCGICEDRGSSAEDMFHSIQRIKASIPPHVRVYPGHSFGEKPGQKMESLLKNNIYFQIEKKEHFVNFRNRKNQKGLFHFK

SEQ ID NO: 36 - protein, 289 aa, Bacillus velezensis
MITYLFPGQGSQKQGMGSSLFDEFKDLTEQADETLGYSMKRLCLENPYSNLHKTQFTQPALYVVNALSYLKKIQDNDIKPDYVAGHSLGEYNALFAAGAFDFITGLQLVRKRGELMSMATDGKMAAVMGLTAAQVSDALQTHGLHTIDIANMNSPHQVVISGRKEDIERAKSVFEGLKDVTMFHPLNVSGAFHSRYMSEAKQEFEKFLQSFHFSAISIPVISNVHARPYEQDGIHSVLADQIDHSVRWNDSIRYLLDKGRMEFEEVGPGHVLTGLIHRIKKETEASPAM

SEQ ID NO: 37 - protein, 324 aa, Bacillus velezensis
MNQPIVFMFSGQGSQYYQMGKELFAHNAAFRQKMLDLDDFAVSRFGYSVLKEMYHTGNRLSDPFDRLLFSHPAIFMAEYALAYALEQRGIRPDYVIGASLGEYAAAAVSGVLSAEDALDCVLEQARIVTETCRNGSMLAILGDPALYQDDPLLGEHSELASVNYHSHFVISGEREHIKKIMDDLREKQIPHQLLPVSYGFHSALVDQAEQPYKRFLAQKSIRTPFIQYISSATGEAETDIQADFFWDIVRKPIRFREALQFADSRQKGLYIDAGPSGTLAAFAKQILPAGSAERIRAIMTPFHKEQTHLQQIEDSILSPPGRRL

SEQ ID NO: 38 - protein, 746 aa, Bacillus velezensis
MISFVFPGQGSQRIGMGEDLFGRYPELTAKADHILGYSIQELCRDGERLNQTQFTQPALYVVNALSYLKKTEETGLKPDFTAGHSLGEYNALYASGAFDFEEGLQLVKKRGELMSRAKGGGMAAVIGLTHEQVTDVLRENHLDMIDIANMNTPQQIVISGYKEDIEKAASVFEAVNGVKMVHRLNVSGAFHSRYMLEAKEEFSRFIESFHFKPLSIPVISNVTARPYEQRELKETLTGQITGSVNWTDSIRFLMGRKNMSFEEIGPGKVLTGLIQRITAEAEPITDEIKVPAESGKSSITAASLGNEEFKRDYQLKYAYLAGGMYRGISSKEMVVKLAEKGMMGFFGTGGLNIAHVEDVILSIQHELRDGGSFGINVVHNMKHTDSEEKMIDLLLKHGVQNLEASAFLTVTPALVRFRAKGLKRGAGGQIIARQRIIAKLSRPEVAEAFLSPAPDHILQKLAAENKITAEEASLMREIPVAHDICVEADSGGHTDGGVAYSLMPAIIRLRDDMMKKYRYGKTVRIGAAGGIGTPEAAMAAFMLGADFIVTGSINQCTVEAATSSLVKDLLQQMNVQDTAYAPAGDMFESGSKVQVLKKGLFFPTRASKLHELYQRHRSIEEIDEKTLRQIEEKYFKASVSSIYDKVKAHYSNEDISKAERNPKQKMALIFKWYFRQSSASAIKGDPDAKVDFQIHCGPALGAFNQWVKGTELESWKNRHADGIGLRLMEETATLLNQKLGSFLQTC

SEQ ID NO: 39 - protein, 82 aa, Bacillus velezensis
MSKEKIFELLQNTIYEVLPDLEGEQLSQEDQLVDLGADSVDRAEIITMMLEELSLQIPRVELTGVSNIGELAAKLYEKVQAV

SEQ ID NO: 40 - protein, 420 aa, Bacillus velezensis
MAAAGIEAINVFGGTAYLDVMQLAEYRNLDPARFENLLMKEKAVALPYEDPVTFGVNAAKPIIDRLTEAEKDRIELLITCSESGIDFGKSLSTYIHDYLDLNRNCRLFELKQACYSGTAGLQMALNFILSQTSPGAKALVVATDISRFLIAEGGDALSEDWSYAEPSAGAGAVALLIGENPIVFQADAGANGYYGYEVMDTCRPIPDSEAGDADLSLMSYLDCCEQTFREYKNRVPGADYKETFHYLAFHTPFGGMVKGAHRTMMRKLAKAKNAEIEQDFQTRVEPGLRYCQRVGNIMGAASLLALASTIDQGAFDTSKRIGCFSYGSGCCSEFYSGVVTPEGQTRQHSFKIEEHLNNRYRLSMEEYEELFKGSGLVKFGTRNVKLDMNMIPNILDHHAGSPRLYLEEITEFHRKYRWIS

SEQ ID NO: 41 - protein, 257 aa, Bacillus velezensis
MTYETINVRFQQNVCFITFDRPEANNTINERLVEECLHVLSECEDSVTSVVLEGQPEVFCFGADFDEMYRKMRQGMQHAESQEPLYRLWLALKSGPYITIARVRGKVNAGGVGFAAACDIVIAEESASFSLSELLFGLYPACVLPFLIQRIGCQKAHYMTIMTKPVPARQALEWGLCDVCVPDSATELRKHLLRLRPLSKKAVIRYKQYMDSLNDLVHRSKSIALAENQAMFSDPDNQSAIFRYAETGRLPWETENS

SEQ ID NO: 42 - protein, 249 aa, Bacillus velezensis
MPNAAVELLEIEPDIIQVTMQDKAHKNAFSKELTDGLMEAFTRIKKSSVYKAVILTGYGHYFASGGTQEGLLRIQQGITKFTEDRMYSLALECDIPVISAMQGHGIGGGFVMGLFSDFVILSKESVYTANFMKYGFTPGMGATFIVPEKLGASLGHEMLLNGGHYRGGDLEKRGVPFPVLPRQEVLDYAQELARELAEKPRNSLITLKRHLVTPFREQLPAVIEKELIMHDETFHDDEVKKRITTMYGV

SEQ ID NO: 43 - protein, 4984 aa, Bacillus velezensis
MKSDMKASGLLKPSVSYGKSLRLSADQPMTIPEVLHKTAAAAGDQKGITYIQPDGTKVYQTYSSLKKIALSIVKGLRQSGVKAQDEVILQLSDNSQLIPAFWGCVFLGAIPVPLAAAPAYTEMNSGTQKLKDAWTLLNQPYVITSRDVLPEMTEWAEEQELSGFCALAAEDLSAHEMDTDCHHPRPEDLAMLLLTSGSTGTPKAVMLSHENIVCMVKGNIQMQGYTSEDVTFNWMPFDHVGGIGMLHLRDVYLGCEEINIPSESILMDPLKWLDLIDHYRASVTWAPNFAFGLLADFAEEIQTRKWDLSSMRYMLNGGEAAVAKVGRRIMELLEPHGLPANAIRPAWGMSETSSGVIFSDEFTLENTSDDDRFVEIGLPIPGFNMRITDDRNQVVEEGEIGRFQVSGLTVTSGYYERPDLNESVFTEDGWFETGDLGFLREGRLTITGRTKDAIIINGVNYYSHAIESAVEELPEIETSYTAACAVRPNQSTTDELAIFFVTSVPLDENRMTKLIHHIHQHVTQRIGVTPDYLLPVAKEDIPKTAIGKIQRTQLKHSFEQGQFDSLHNNRQEGSNSDTASAEKEIERDFIRFLKEELSIADELVDPNTPFQSLGVNSIKMMKLARSIEKTYHIRLTARELHKNPTIGALAAYTAEKAANMSADHHPQKAEPPAERERRQTAPALSEVQKGLWTLQKMSPETTAYHVPLCFRFTSGIDKEKLKQAFQLVLKQHPMLKSAVNETDGGFYFIEAADPFVFSEEDISDVNESQISALIRKKVKEPFVKESGPLLRVQLLSKSAEEHYLLTVIHHIVFDGISSITFIHSLLDHYQALLEGKEEFTAAASGIHPDFAAWEKRYLAGEESKAARAYWMKQLGGDLPDLQLPPMRTDSSVAEFTEDTLTRRLPERLLNNLTAFAASRSIHLSTVMLSCYMVLLSKYTDKEDIVTGMPAMVRPEERFDRVVGHFLNMLPIRSRAGRKETFADFVQKVQDAVLDGLDHSFYPFPKMVRDVHAKPRQNGSPVFSNAFFYQNFLQHSSYQSMLDEYKEFSCEFVKDIHQEGEYDLVFEMWEEASGMDLTIKYSTELFDEAGAARLFSQFVQAAEALTANPDTPLENVSLMTKREEHMILNTWNETSREYPDACFHELFERQAAETPDACAVVYEEQKLTYRELDEKSTKLALYLQAHGAGPDDLIGIYTDRSLHMAVGLLGILKAGGAYVPLDPSYPADRLEYMITDSRISMCLTTADLEHSLNWGGVQTTAIDRDWSRIESTAAERTSLKRLVTPDDLAYVIYTSGSTGKPKGVMIPHRALTNFLLSMANEPGLSSEDKLLAVTTYCFDIAALELYLPLIKGAECNICKTEVTKDARKLKELIQEYKPTIMQATPFTWKMLFHSGWSNEENVKILCGGEALSEQLKQQFLDTKSEAWNMFGPTETTIWSAVQRITENENALTIGRPIANTRVYIMDSGLNPVLEGVPGELCIAGDGLARGYFNKPELTDKAFVSHRLELGSKLYKTGDMARFLPGGRIEYMGRMDTQVKIRGYRIEPGDIESRLNAHPAVQESVVVVNNHSGNEKLCAFYIRKNGEPLPSAKELRNHLKQALPAYMTPASFIRLEELPLTPNGKVDRKLLAARDLTEKQPDTQTFSSSHIQQAVLAIWQDVLKSKDIELDDRFFDAGGDSLLAVTVTDRMTQELDCEFSVTELFEYATVKDISRYIAEQKPKEAFLAPVPQKKVNAEDREHPAGEFPDYYEDSLAVIGISCEFPGAKDHYEFWNNIKEGKESITFFSKEELRRFGISEELADHPGFVPAKSVLEGKEMFDPGFFGFSPKDAEYMDPQLRMLLLHSWKAIEDAGYISKEIPETSVYMSASTNSYRSLLPEETTAQLETPDGYVSWVLAQSGTIPTMISHKLGLKGPSYFVHANCSSSLIGLHSAFQSLQSGEAKYALVGGATLHTESSAGYVHQPGLNFSSDGHIKAFDADADGMIGGEGAGAVLLKKASDAVKDGDHIYALLRGIGVNNDGADKVGFYAPSVKGQAEVIQKVIDQTGIHPETIAYVEAHGTGTKLGDPIELSALQSVYGRYTDKKQYCGIGSVKTNLGHLDTAAGMAGCIKVVMSLYHQEIAPSINYKEPNPNLHLEDSPFYVAGEKKELTRENRAHRMALSSFGLGGTNTHAIFEQYPDASEAADAAGPFIIPLSARKKDRLKEYAKQLLAFLERKTDADLADLAYTFQVGREAMEERAAFITSGTAELKRQLADFINDKPAVTGCFRGEKQQAKDIAWLSDDDDSAELIEKWLAKGKGPKLCEMWSKGVAINWHKLYKDKHPKRISVPVYPFAKEPYWPKKAEKNTSAAHTGVSVLHPLVQQNTSDLAVQRFSSRFTGSEFFLKDHVVREKAVLPGAAYLEMSYEAVKRALGGLLKDQDRITLHHTVWMKPIVVHEQERQVHIALFPEEDGIISYDIYSVNADGEEVLHSQGRAEIIKAEQEPERDLSAIQNRCTADILDPAAFYREGRSRGMFHGKAFQGIKSAFIGDKEVLSDIQLPDSVSHTNGQFTLHPSIIDSAIQTATICIMQEFSGQKLILPFALEYLEVIKACTPTIRAHARFSDGYQTGDSVQKADIDLFDETGALCVKVRGFSTRVLEGDAESAQRLSGSEKVLFAPVWKEAAASEKASVHADEHLIILCEDACRIKDEAASGLKDAELLIAEGEGETAAERFQSFAQTIAEHIRRIISEKRQGRILIQTVISADGSQQLFAGLTGLLKTAELEYGKLDCQLIEMESIGEMPAVAQKLKNDSHRPHDKHIRYKGEKRYVKAWEEMHPAGGGIVWKDEGVYLITGGAGSLGLMFAKEIAGRVKHPKIILTGRSNLAEAKQRELAMLQHSGANVVYKKLNAADRRENEALIKEITAEFGKLNGIIHAAGVIQDRFLLQKTKEEFREVLDPKVIGTAYLDEASKDCNLDFFVLFSSVSGVLGNVGQADYAAGNAFMDAYAAYRQSLTENGLRHGKTVAFNWTLWKDGGMQAGDETEKMMKKAFGMVPLQKASGLAAFYEGMAQEKPQLLAAEGHAAKLKQSFLSVSETEKPQVQSIEPVSAVSGDKWHGALIRLVSSILKVGQDEIDIDTELSEYGFDSVSFTVFTNQLNEAYQLELAPTIFFEHGTIRSLAEYLTDEAEAGLPSQPEEKHDAEESLQTLHTALTAMVSGILKVDREDIETDTELSEYGFDSVSFTVFTNQLNEAYQLELAPTIFFEYGTISNLAGYLAKEHPGRFGEKKKESPKKEQPKAQKPKMQRKKRFATVMNAAAATQEPRRLDPVAIVGISGRFPGAKDIEEFWRNLKEGKDSITTIPKERWDWQAFDDDPNLEGNKTNIKWGGFIDGIAEFDPLFFGISPREAQYLDPQQRLLLTYAWRAIEDAGCKPESLSGTNTGVFIGTGNTGYKDLFTRAGLAPEGHAATGSMIPSIGPNRLSYLLNLHGPSEPIETACSSSLVAIHRAVSAIENGECDMAIAGGINTILTEEAHISYSKAGMLSKDGKCKTFSKDANGYVRGEGAGILMLKKLTDAERDGNPIYGVIRGTAENHGGRANTLTSPNPKLQADLLVKAYRKAGVDPSTVTYIEAHGTGTELGDPIEINGLKAAFHELAKTNQEPEVSGHRCGIGSVKSNIGHLELAAGVSGVMKVLLQMKHKTLVKSLHCETINPYIQLDDSPFYIVRENQEWTAAKDRNGNAIPRRAGVSSFGIGGVNAHIIIEEYVPKAAAQPEHSPENPAIILLSAKSKEKLFEQAQQLQKAIRQTPYTDQDLAGVAYTLQIGRDEMEERLAILAATMAELETKLEAFTKNEKNIAGLYTGQSHRNKDTFALFTADEDMDIVIDAWIKKGKFAKLAEVWVKGGVLNWNRLYEKGTPRLLSLPSYPFAKDTYWVPENPDKKKVHTEERMKRILTKQWELSPLELGEPCARSVAILTGGDTINLAEEIAAHMPNHRIITTSDLTGVYDWQAFGGVIDLLGAAKEEASGDMTGIKWLQQLIEHGHKEGITLLCVTKDLESMGKKANQITGAKRAGLYRMLACEYGHLSSRHLDLEGALSDDKLAKQIADEFHARTDDAEVCRRDGLRYRAVLSGSENMNMQGERIDFPDNHVLLITGGTRGIGLLCARHFAEHYGVKKLVLTGRETLPPRSEWTGGLNGVTASVKAKIEAVLDLESKGVQVKVLSVPLADEAGLRQELSQIKQTLGPIGGVIHCAGVTDKETLAFIRKTDEDIQRVLEPKVDGLQALYSVLSEEPLKFFVLFSSVSAAIPALSAGQADYAMANAYMDYFANSYKEQLPIVSIQWPNWKETGMGEVTNKAYKESGLYSITNAEGLQLLDGILLESARGPVLPAVLNPKLWKPERFLRRSRQDQPMSPAMVKPAEKTADTAADNAQLTRKTEEWLKELFSEELRIDQDQLETDVLFQDYGVDSIILAQLLQRINRNLSASLDPSILYEYPTIQSFANWLLEGYTEVLLERFDLAAAEPVLKKPAEPVIETQAVKVQEEPAGKQIHREDIAVVGMSCRFPGAASLEAYWSLLAEGRSAIRPVPAERWGWKTPYYAGMLDGINQFDPDFFLLAEEDVKAMDPQALAALEECLNLWYHAGYMPDEIKGEAIGVYLGGRSRHRPGEEKLLDAKNPIVALGQNYLAANLSQYFDMRGPSVVLDTACSSALVGMNMAVQALVTGEIKAAVVGGVSLFESEETHKLFEQRGILSKAQSFHVFDERADGVVLGEGVGMVLLKTVSQAIEDGDSIYAVVKAASVNNDGRTAGPATPSLEAQKSVMKTALEKSGKQPEDITHIEANGSGTVVTDLLELKAIQSVYRSKDAGPLGIGSVKPNIGHPLCAEGIASFIKVVLMLKEKSFIPFLSGEHENTHFDREKANIQFSRTLADWPSPIPAAGINCFADGGTNAHVIVEAWQEDEGRRVKRHPLTPPALNKRLISPDSKEETNEKAAANIWDTYEVEV

SEQ ID NO: 44 - protein, 4472 aa, Bacillus velezensis
MKNFNKQITLSLKNPFILHHDVYGQKVLPGLAYIDMFYQIFKERGYSYDGLQLRHLSIYQPLIAKEDSAVKLTVECTKVKEGRWKLTAKGAEVSGGRVQPEERIYVKAEMHETAPAIFSDTLDLDSVKREAERTIDLNELYAQCRSQELVHSGYMKAEGEVFEERDGVIFDVSLGKDAMGQAGGFLFHPTLLDGSGVGANLLISSLLNGEKRLFLPLFYESFTASEPLQSGCITRIKRSSLRQEKELIYITLEFFNASGRKVAELKDFTSKLVRDAELINTERKTAEKSTEKAGLPEVAASLEGGHPHEEAERYVMNLMAEKIGKPLEQIDSQVGYYEMGLTSSGLLDVVETISEKIGETLSPTLLFEYTTAAELAAFLTEQYGSHFNAPPAKMAKPVEPQTENRRKSSVPQDEDIAIIGMAGRYPQAENIHEFWENLKEGKNCVTEIPESRWDWRRFENVKSPSGKSISKWGGFIDDPDCFDPQFFRITPREAETMDPQERLFLQTCWETIEDAGYTPKSLAEARGRNKRQRVGVFAGVMHKDYTLVGAEASSEDHVFPLSLNYAQIANRVSYFCNFHGPSMAVDTVCSSSLTAVHLAAESIRRGECESAVAGGVNLSLHPNKYLTYGLWDMFSTDGVCHTFGKDGDGYVPAEGIGAVLLKPLREAVKDGDRIYAVIKGSAVNHVGTVSGISVPSPVAQADLIEECLDKAGIDPRTVSYIEAHGTGTSLGDPIEVQGLVKAFRQYTQDKQFCSIGSVKSNIGHAESAAGISGLSKVALQLHHKTLVPSLHSEELNPYLDFEQSPFYVQHHTEAWQQPSVTENGTETVYPRRAGISSFGATGSNVHLILEEFIPEESHGTNAEPAEEQTFIFPVSARNEERLKEYVAKLSAFIHPGLPLEDAAYTLQIGREQMEERVAFTAQNMTQLKERLEGFLAGKTVSGCWRNRADKSKQAELAPDLIHKWLSSGRLEMIAEKWAGGGTMDWNLLYGENKPNRISLPTYPFEKIRYWVPKAEKRESLPQKNAGMLHPLLHENVSNMSGVRFRSSFSGGEFFLKDHVVKNERTLPGAAYLEMVRAAVEHAAETKEEGTVRLKHVVWIRPFTAADESAELYLRLYDEENGEMGFTVYSESASSEEEPVLYAQGSAAFVRAGEPAKIEIDKLRESRRLITPDACYQAYKQMGIEYGDAHKAVTEIYAKDSEVLAKLSLPSSISHTKDQFVLHPSLLDAAFHATIGLMLDRDGTDIRPMLPFALEQIDVLKSCKSDMWVSIAYSGESKPEDAVQKLDIDVCDEQGNVCVKMTGYSAREIETDKTDTLYFEHVWEERAAVHEKAPIHFKARHVMISDRFTDQMNSIQTDFSCHVLRDQHKSEDERFEACALQAFEEVKKILASNSGGRELIQIVVPQEADTQLLCGLTGLLKTAALENPNLTGQLIETEPDVKADTLSRYVKECSAHPDDKHIRYENGRRYTAQWQETGLEQFGAEKPWKDKGVYLITGGAGGLGFLFAKEVARHAKDAVLILTGRSLLDNRKKAQLQELSDLGAQAVYKQTDITEKQEVQSLTADICRQYGGLNGIIHSAGTIKDNYILKKDKDEIRDVLAPKVSGLVHLDEAAKDIELDFLILFSSGAGSAGSAGQADYAMANAFMNAFSEKRNRKKARNERYGHTLSICWPLWKDGGMTVDAETEAMLTKESGMVPMQTENGIQALYRGWAANTSQVMVTEGYAAKIRAFLKKSADDQPDKGSETEETAGRTAGGENMLAEKTEHFLKQVLSEVTKLPVGKIDAKAPMEDYGIDSIMIMHLTGRLEKSFGSLSKTLFFEYQNIESLAQYFMKAHRDTLLEVTGMKTEETPAAKPALSEKAKVKPVFKRNEGKKGFAQVRPDTRKNQQLTEREDIAIIGISGRYPQAENLQEFWKNLSEGTDCITEIPNDRWDHSLYYDADKDKEGKTYGKWGGFLKDVDKFDPQFFSISPRDAKLMDPQERLFLQCVYETMEDAGYTRKKLTEKSGDLLGANVGVYVGVMYEEYQLYGAEEQARGKSLALTGNPSSIANRASYVFGFNGPSMALDTMCSSSLTAIHLACQSLRNGECEAAFAGGVNVSVHPNKYLMLGQNRFLSSKGRCESFGEGGDGYVPGEGVGAVLLKPLSKAKADGDHIYGLIKGTAVNHDGKTNGYSVPNPNAQAAVIKQALKDAGTDPRAVSYIEAHGTGTSLGDPIEITGLTKAFSEQTQDKQFCAIGSAKSNIGHCESAAGIAGLTKVLLQMKHKQLAPSLHSRTLNPNIDFPSTPFKVQQTLEEWKRPVINENGVNKELPRTAGLSSFGAGGVNAHIVIEEYSADEDKETAYAAPHPSMIVLSAKNEQRLQKRAKRLLDALRSGRYREADLSRIAYTLQIGREPMEERLGMIVSNLRELEEKLDEFTGGKKSIDQLYRGQVKQNKDTMALFAADEDMEKTIEAWLEKGKAAKVLELWVKGLPLNWDKLYQMGRPQKISLPAYPFAKDSYWIDISADAAVKRPAETQSAPIAPAAAPEPVIEVTTLHEETVKEKPSNITLQSLSGAKPKRTVQPASRPAVSAEKVSAVLTESLADVLYMDADDIDADDTFIDIGMDSITGLEWIKSVNKAYGTSLTVTKVYDYPTIRQFAAFLQKELGTEPILEEATEPQKTEAVKKPSNIMLQPLNAHKQHVIQAEADILEAMSETAASAEPEEPIEAVHDELSKALADVLYMERHEVDIDEAFIDLGMDSITGLEWIKAVNKRYGTDCNVTKVYDYPTIRQFADFLRTQPSVRGRKKQTVPVRPKPLTQQHAPQEKTPAEPERLTVQKEPEPVQAKREPKDEIADAIAIVGMSGKYPDAPDLKTYWDNLARAKNAIRDIPLSRWDVNKYYDPALNKKGKVYCRSIGMLDGIEEFDPLFFNISPSEAELMDPQHRIFLQEGFKAFEDAGYSSKELNGKNCGVYLGIMNNEYGMMLNKHQTGGSATGNSFSIAAARLPYYLNLKGPAIPIDTACSSSLVGTHLARQALLNHEIDMALVGGVTLYLTPESYISMCEAGMLSPDGQCKAFDNSANGFVPGEGAGALVLKRLKDAEADQDHIYGVIIGSGINQDGKTNGITAPSAKSQMDLERQVYEAHNIHPESITYAEMHGTGTKQGDPIELEALSSVFKEKTDRKQFCAIGSVKSNIGHTSAAAGVASVQKVLLSMKHQQLVPTLHFSTPNEHFDFDDSPLFVNTELKPWETGGAPRRACVSSFGYSGTNAHLVIEEYQPKDRGSRKPDETNIFVLSAKKAPQVKTYAESVIEFAKANQNINLSDMAYTLQTGRDAMDYRLAVTAGSREELISRLTDFVNGNTGEGIYEAHIKTAKKEIKAFETDDDLKQLVRSWFDKKKYAKIAELWAKGLQMDWDRLYQGKKPRRISLPAYPFAKEPYWLPEPKAVPQETEDRREAVLLEKQWVPCEIDSAGEKSGKTVMILADARTAELAEETAKHFADSFILPVDSADTAASDWNHIDGAIDLTGCGDEDPSLEGISRLQTLIDTSRRQARPLTLLYVTKGLEPFQQKTIHLAGAAKSGLYRMLQNEYQNVTSRHMDADTDTDQQTLAKQIADEFSADCTEPEICRRNGQRYRALFREIPSGKRAEHKPAPFPEDHVLFITGGTRGLGLLCARHFTEKHGVKKVVLTGREPIPPRHKRSAVNTRLKEKIRAIEELEAKGVQVAVISLKLSDHDAAAAEIETIRRTMGPIGGVIHCAGSVNSVNPAFIRKTADDIQEVLEPKVAGLQTLSSLFTNDPLQFFVLFSSVSAVVPALAAGQSDYAMANAYMDYFAAAHQHQYPLVSIQWPNWKETGLGEVRTESLKQTGLLGLSNAEGLDLLDRILSENIRPSVLPAIVDRSEWHPDRLLCQVKTQKAVVNGKAAEKHSDRDLFLDTKAWLVKLFSDELKIAPEELETDEPFQDYGVDSIILAQLLQQMNQALKEDLDPSVLYEHPTIDAFAEWLVSNGQPLLAEREEPDTQILVPAAVQTVHTEQKLDTVTEDIAVVGMSCRFPGAESLEQYWDLLRSGRSAIGSVPAERFGYANQYVAGLIDNMDHFDSEFFFIPENDAKAMDPQALAVLEESLKLLCHAGYSREEIKGIEAGVYIGGRSQHQPDPESLANTRNPIVAGGQNYLAANVSQFFDLRGPSIVLDTACSSALTGMNMAVQALRSGDIKAAVVGGVSLLNTDAAHRMFQERGLLNEKPAFHVFDKRSGGVVLGEGVGMVLLKTVSQAQKDGDTIHAVIKAAAMNNDGRTAGPSAPNMQAQKDVMQSALFKSGKKPEDISYIEANGSGSAVTDLLELKAIQSVYRSGQHVPLGIGSIKPNIGHPLCAEGIASFIKVVLMLKHKQTVPFLSGDEPMPHFDITKTDFHFHKTAGEWDAARPSAAINCFADGGTNAHVILEAWEEKDTRMKRKPLPVPSLRRKALVKEPDAPAEKQELPAKKMFWKAFK

SEQ ID NO: 45 - protein, 3511 aa, Bacillus velezensis
MISEKINISLDHPIMKGHKVFGEAVLPGLAYIDLIYQVFQEHGYVYNELELKHVTIYQPLTVSETAAIILTIQCSDSGDGKWLISLSGQKQQGDELSDNIQYATAEMVKRDAVTFDETIDFGDVKQSGRSLNLDDMYNRCLDHDLVHSGMMKSNGRLYETEDGMLAELSCEEGKDFFLFHPALLDASGIGGSGLLSETNRLHLPLYYESFTAADRLQSECTARIAASGVRQEKELTTMTIEYFSRSGQKVAELKNITGKAVRLEEDENTAEQNQQAATEPESTDEKDIILFLKKLLADKLRQPWETLDVLAGYYELGLDSSSLLEIVQDINKKTGADLAPTLLFEYTNIKELAAYLKKTVSFECAERAAEPSRSEAEAPDAPEHHKNTGDIAIIGMAGRYPKAKSVAEFWENLKAGTDCITEVPKSRWDWRTYKNVTSPSGKTVSKWGGFIDDADCFDPQFFRISPREAETMDPQERLFLETCWETIEDAGYTPETLGNKGEKQHPIGVFAGVMHKDYSLIGAEQLSETDPFPVSLNYAQIANRVSYYCDFHGPSIAVDTVCSSSLTAVHLAIESIRRGECEAALAGGVNLSLHPAKYLSYGSVGMHSSDGRCRTFGEGGDGYVSGEGVGSVLLKPLDKAEQDGDRIYAVIKGSAVNHVGKVSGITVPSPAAQAEVIKACLKKAGISPRTVSYVEAHGTGTSLGDPIEIEGLSKAFSQGTQDQQFCSIGSVKSNIGHAESAAGISGLTKAALQLHHKTLVKSLHSAELNPYLKFEESPFYVQQQTAPWKQPSAKENGKVTHYPRRAGLSSFGASGSNAHIILEEYIQPEQKAPAPENHAAKLIPLSARNKDRLLAYAEKLARSLSEKTVLSELAYTLQTGREAMEERAVFLVNDTRDLKEKLNDFVKGNENIPGLWRGQAELPEMSEAAPETDDPIRLAELWAEGKIIDWNKLYASGKPRKTSVPTYPFAKERYWIPQQKKQEKSPSGTVLHPLLQENTSDFSQQRFTSLFTGDEFFLSDHVVNGQKILPGVAYLEMAREAVKKAAVVTEKGHSVTLRQVVWVRPVMIEDKPKEIHIALYPEDNGEITYEIYSEAENGEDPVIHSQGEAVITEPGSAQIDIESVKTSCNLGIVTAEECYGAFEKIGLDYGEAYRGVQQLLIGEDRLLARISLPAAVHDKKEQYTLHPSMMDAAFHASVGLLVRSIHDDADSHELSLPFAMQEVEVFGPCPEHIWSYIRYTEGSKADDNVRKFDIDMCDDAGTVYVRMKGASVRALDTSQTAGGETSEAPVGHTMLIPAWEPVALEKAGEAAADKQTAVFGGTDSRHTRIKEHLPNASYYPIRGTDDITSLTHMLEGQKELEQIIWLAPQAESADSLKEQERNVLHVFKLMKALLALGYGEKRLDWCIVTANAQPFSDQDSADPSQAAVSGLAGTMAKEYPHWHIRMIDTETDGSWPIEEALSLSAGKNGQIWAYRNQQLFERQLIPLDNMPKNGTLYQTGGVYAVIGGAGYLGEAWSEYMIRRYKARIIWIGRSTLNDSIQAKLDRLSAFGPAPEYVSADAADSASLERAYQFIKERHTKINGIIHSAMDLSEQSLNNMKTEEFKSVLRAKADVSVSMAEVFGREPLDFALFFSSLVAFIHNVKQSHYAAGCAFSDAFAKELDQTWNCPVKVMNWGYWGNSEAAEDGDFIQLMDQIGLGLIEPDAAMEALETLMTLPVDQAAFIHTTKPVAVEGMNEREKISVYPPQPLVFSQQPKVAPPGARLVREAEHQELDDFLYQLLIAQLKEADLLTPQSLKAYEPEHEYFKKWLNQTIAFLLEHGYLEGNADSYKLSARAENTTAALWQKWEREKEEWLNNADTKAMTVLAETMLKALPDILREDVPATDIMFPHSSMELVEGIYKHNQVADYFNSALSDTLTAYVKENISKHSKAEIRILEIGAGTGGTSAGIFEKLRPYQNHIKEYCYTDVSKAFLVHAETEYGKRNPYLTYKLFNAEAPLAGQDIEPGAYDIVVAANVLHATKDIRQTLRNAKAVLKDNGLLLLNEMAGNSLFPHITFGLLEGWWLHEDSALRIPGCPGLYPESWKRVLESEGWHSVFFPAEAAHELSHQIIAAKSNGIVRQKTLKSGAGKRTSPPKAVHAPELQAQTTVQKGDTSLTEKSTEYLKTLIGETLKIPPAQIDPKAPLEKYGIDSIVVVQLTNALRNVLDQVSSTLFFEYQTIEALVAHLIKTKKDAMIKLTGQTPVQEERKASPEPQAVQPAKPLRTDWRRREKRAAKETVRQSSVRDVAIIGVSGRYPQAKTAAELWANIKKGKNCIEEIPRERWNWQDYYDEEKGKEGSIYTKWGGFIEDMDKFDPLFFQISPLEAERMDPQERLFLETAYASIEDAGYTPDNLCQSRKIGVFAGAMNKNYPTGYGYWSIANRVSYLFDFQGPSIAVDTACSSSLTAIHLALESIYSGSSECAIAGGVNIVTDPIHYMNLSVMNMLSAGDTCKSFGDRADGFVDGEGVGAVVLKPLDRAIADNDHIYGVIKGSTINSGGKTNGYTVPNPNAQAALIKEAFERANVPARTVSYIEAHGTGTALGDPIEIAGLTKAFEEDTTDKQFCAIGSAKSNIGHCESAAGIAGLTKILFQLKDRQIAPSLHAEQLNPNIDFAYTPFAVQQELGEWKRPVIGGQELPRRAGLSSFGAGGANAHLVIEEYTADKEPDETPADQPAIIVLSAKSSERLTEKAKQLRDAIREKRYSGSDLMSIAFTLQTGRVPMEERLGFIVHSLHELEEKLNGFTSGQNSAGLHRDGTEENKRMLAVFSADDDLETIIDAWISKRKYSKLLELWVKGLDIDWAKLYGDRPPARISLPAYPFAKERFWHQQPVQSKAAPVNAPADESDPAEQFEVMAFREVLKEQALPAAGEKQVKTVISFLSDQKKQQEAVSVIKSYDNDIDVIFIAQGDRYEALSAGRCQVVREDPQSYVNAFADIQKEYGEASAILYLWALEDKSCIEDYSCIVHILQAMAETGLQPERLLLAGEYASGLERCYLESWIGFERSLGIVLPKTSVTGHFRKAGAAITDWMRTIWDELKAETDQTVFLEEGKRYVYHTEPTGLTKENGRIRTGGTYLITGGLGGLGYLFARHLARNYQANVILTGRSPINEEKKEKMKDLENLGAGVLYAEADVCDPIGMGDCIKRAKERFGAIHGVIHAAGIESRTSVFENEIGNFRSTLEPKINGSLLLDEWLKNETPDFICYFSSTSAVLGDFGCCDYAVANRFQMAYANYKNEQSESGNAFVINWPVWKNGGMAVGGEETTGMYLKSSGQRLLETDEGIELFERVISQDNTQCLVIAGERSRAERFLGIRRDDSSKPDALLETVSRRIPEESAEKRLEADLKELIHSLLKISKDKLVLHKNWAEFGFDSIYLAKFAALLTSHYGIEVTPALFYSYATLGDVISYYLTEHKETIETFYRTEETETEAAAPDNKENTDQEIIAMMKQVSEGTLDFKRVQDIIEGSKTYES

SEQ ID NO: 46 - protein, 5433 aa, Bacillus velezensis
MNHKELLDAYRSGTLTIAEVEQKLQAFKRTTAKRPLSEGQKGLWMLQKMFPEMSAYNIPLCFRFQKLDIETFKNALLSVQRQHPILTSVIKEENGLPYQIEDTDRHFPIEEMDLSELSGRDALTFIKEKAKEPFSLETGPLLRVQVFRRAKREPIVLITIHHIIFDGVSLMTFMSALLDAYVKASEGKEPVMLQQSADYHDFVKWEKELLESEAGKAHLSYWKKQLEGPLPVLELPSDYPRSSVQTCKGQAYQRLLPDELNRQIKVCAQKNNVNESVVYLAIFKGLLYQYTNQEDVIVGMPTMGRSEAQFESVIGYFINMIAVRSRETGAKSFTSFLKELQLTLAEGLYHAAYPFPALVKELKTERSPAVSPVFQTAFFYQNFFRTEGAEKLAELYQSLGIEMIEDIHQEGEFELALEVYKKETGTVLQFLYNPDVYSPSFIERMAEHYMKLAEKVLSDPEIAFEACSGLLNQKRDESRSSHQPNERCIHEVFAEKAGRHPDREAVTFGENSLTYRELDERSTALAVYLQEKGVTPECPVGICTERSFEMVIGILAILKAGGAYVPLDPAFPNERMAHVLTDSGVSIVLTQEKTRGMIEQLAIGGVSTVEIENSGRSVSGAKLTPRSKPHHLAYILYTSGSTGKPKGVMVEHRAIMNTLQFLEAEYPVAQEDAYLLKTNYVFDVSISELFGWFIGNGRLVILPPGAEKNPQLCMEYIQTHQVTHLNFAPAVFNVFLETVKRHTAFTEDGPVKYVMVAGEAFPKDLVKKSVSIFKHARIENIYGPTETSIYAAYYSCGQKEITSRNTPIGKPIHNTRLYIVDEKLSPVPDGVAGELCVAGAGLARGYYNQPELTAASFIDNPFSEGEKLYKTGDLARWLPDGNIEYAGRIDSQVKIRGFRIELGAIETKLSEHPDILDQAVVVQEKNGHKKLIAYYTARSGHTADEKALRNHLLSSLPDYMAPAHFIRLDALPLTPSGKVNRKDLKQRKVIVHRSEKTGRLPLSEAEAKVTAIWEDLLNTAGIKIEDGFFDVGGDSLLAVAAAERIKQELECDFTVTDLFEHSTIQAISRFIVETKQAAESVAPGQDEREREQTPQNGVPSYFDDSVAIVGISCQFPGAKNHHEFWKQLREGKESVRFYSEEELREAGVPEDLIENPDYVPALSTIEGKDLFDPEFFHISPKDAEFMDPQLRLLLLHSWKAVEDAGYVSKEIPKTSVYMSASNNSYRSLLPEKTTEGHESPDGYVSWVLAQSGTIPTMVSHKLGLKGPSYFVHSNCSSSLVGLYSAYKSITSGESEYALVGGATLHAATSIGYVHQNGLNFSSDGHVKAFDASADGMAGGEGAAVILLKKASQAVQDGDHIYAMLRGIGLNNDGADKVGFYAPSVKGQTDVIQHVLDSTNIHPETISYIEAHGTGTTLGDPIEMSALQQVYKRYTDREQYCGIGSVKTNIGHLDTAAGLAGCIKVAMSLYHRELAPTINYTSPNPNIKFSGSPFYVADKRKPLPERETPHRAALSSFGLGGTNAHAIFEQYENKTISGSNDGQPPYIVPLSARNKQRLTAYASCLSGFLDEAENDVSLHDLAFTYQTGREAMEERAVFISHDRHDLKRQLQDFINGNDQNILRGEKVRSREVSAQEMEELAACQTRDEKLKALAALWVEGARVDWRLLYPDSAPQRISAPTYPFAEERFWPEETVKQTDTKLLHPLVHQNTSVLQEQRFSSEFTGKEYFIAEHIIKGMAIVPAAVTLEMARAAAEKSIGGATEESLGLRLKNIVWVRPVIADQEAVRVHIGLYEEEDGQIQYRMYGGNDSIGEEAPLYNQGIAEIIRKEPEEAVDIEQLKRRCTQGTIESQAFYKGMIGADYGPGYKGVQLVYKGEDRLLAKLKLPESVSHTKADYILHPSMMDGALQAAEYLQNVTRALLAESGEPFKAALPFALEELDVLNPCADDMWVHVTFSANNKAGDPIQKADIDLYDNNGWLCVRMRGFSTRIMEENAGASVSVSRTDTLLAEPIWKEQTEPADHEPTYEEHIIFLCEYDEAVKQAVEAKLEHASVIILDDRPASIAERYHSYAGQLFDHIKTIMKSKPKGSVLFQAVTRSAGLQQVFSGITGLLKTACLEHSKLICQMIEAEEKESAEGIAEKAFENRMHAESVHVKYENGKRFAADWGEMDISQAEPDIPWKDEGVYLITGGAGGLGLIFAKEIANRTKDAVIILTGRSVLREKQKDMLETVRAAGASVFYEQTDVTDEAEVYRLIRNIRKRHGKLDGIVHSAGIIKDNYMVKKTAEEYQHVLAPKVKGLVYLDEASQHEKLDVFIVFSSLSGVLGSVGQADYASANVFMEMYAEYRRSLQAAGQRYGKTLSVSWPLWKEGGMQAGKQTEDMLMQEAGIAPLGTDAGIKALYQGLMSGTARMTVVEGDVKHMKAKLFRKENDHPEAETGVRHDIDADSLLEKVKHLLKQQTASLLKVNIDKIDPHEEMTKYGLDSISMTEFTNQLNKTYRLTLTPTIFFDHPTIHEFAVHLISEYEEEFAGRFAVNTKTVQSARPVKETQITRPAVKRRRTLPETLPQTVQRGQGPEPIAIVGISGIFPMAEDIEAFWQNLKEGKDCMTEIPKDRWDWRDYYGDPAKEANKTNVNQGGFIDGIAEFDPLFFGISPREAEQMDPQQRLLLTYAWKAIEDAGYASKSLSGTKTGVFIGTGNTGYGSLLAKTDAAIEGSSAANTSPSVGPNRVSYTLNLHGPSEPIDTACSSSLVAIHHAVSSIEEGTCDMALAGGINTIVLPDVYISFDKAGALSKEGRCKTFSDQADGFAHGEGAGLFFLKKLKAAEADGDHIYGVIKGSAVNHGGRAASLTTPNPKQQAEVIKAAYKKAGIDPKTVSYIEAHGTGTELGDPVEINGLKQAFSSFADGKEKAAGYCGLGSVKTNIGHLSLAAGAAGIIKILLQMKHRTLVKSLHCETVNPYIQLEDSPFYLVRETMEWKTQTDERGNEQPRRAGISSFGIGGVNAHVVIEEYIPEDREEADDFHIDPCLFVLSAKNEKRLKEQAKQLKRALTEKRYDQSSLVSMAYTLQIGRDAMEERLAVIAGSAEELQEKLSQFITGDKHADLYRGRIDKGTLQMLTEDEEIQEAVEKWMARGKYAKLLELWVKGLNVDWAKLYGDRPPKRMSLPSYPFAKDRYWAAKSTGKHEKTSTVSAGKQDALHPLLHRNTSNLAEQRFSSIYTGKEFYLADHVVKGVPILPGVAHLEMARAAMEQASEVPAGQGSVKLKNTVWVRPITIEDEPVHVNIRLIPETANDVQFDIYSGRETGQPSVYSQGAVSVRPDAEAPVIDLQKLRSQSAETPFSADEVYDMYRKIGFDYGPAFRGVKAIYTGGDFVLGRLSLDAACADTVQEYVMHPGLMDSALQASSILTGTNDEKLMLPFAVQELEVFSACAAEMWVYARLSEDHKAGQVEKRDLDICDENGKVCVRLKGLSFRMAEKEPEKKEKAPGTLMLEPVWTRSDETATQTEPVFARHIVILCDTDAGLKQAVEAAGAECIEMTSQHGKAAARFRDYTGRILETLQKLLKEETDGDVLIQTVLSKTDKHQLLSGISALLKTAGLEHKKLKTQLIEIEPAENGRITDIIRENKTRADDSHIKYENGIRYSADVRETAVSGGKIRIPWNDGGIYLITGGAGGLGFIFAKEIARKVKEPTLVLTGRSALSENQRMQLQSLESLGAKAEYKQADVTNAQTAADLVKTIETEYGGLHGIIHSAGVMKDQYIAKKTTEEFYSVLAPKTDGFVNLDEATEHLALDFFIVFSSISGVTGNAGQADYAAANAFMDSYAAYRNALVTAMYRHGHTLSVNWPLWKNGGMQVNEEMAKLTEKRTGVTPMRTETGIEALYKAWSMGKTSVLVMEGNRAVMREKLLQKTPAAAFAPVKKTDETPAPKDLTAKLQELLAKEVSGLLKINIEEIDIELEFNQYGFDSITLTEFANKLNDTYQLDLTPTVFFEYATIQALAHHLAEDYQTQFAGSTQPKEEKQSGVTDDGGIRLAGNKRFAKTAVQPVQTAAEYKPEPIAIVGMSGVFPKAANIDEYWRNLEEGKDCITEVPADRWDWREYYGDPLNEANKTNVKWGGFIDGVADFDPLFFGISPLEAEQMDPQQRLLMMYAWKAIEDAGYSAKSLSGTKTGLYIGTGNTGYGSLFSDLDIGGASAANMSPSAGPNRVSYMLNLHGPSEPIDTACSSSLVAIHHAVCAIENGNCDMAIAGGVNTVVTPQGHIAYDKAGALSKEGKCKTFSDRADGFAVSEGAGILFLKKLSEAEKAGDHIYGVIKGSAVNHGGRANSLTTPNPKAQSEVVRTAYDKAGIDPRTVTYIEAHGTGTELGDPVEINGLKSAFQKLYEKTGDSAVYASHCGLGSAKTNIGHLSLAAGVAGVIKVLMQMKHKTLAKSLHSEVINPYIKLKDSPFYIVQEKREWTALKDENGNHLPRRAGISSFGIGGVNAHVVIEEYIPKEERKTAVFTHPQIFVLSAKEEERLQEQAQQLAQASFTDADLADVAYTLQQGRDAMEERAAIIASSAEELRDKLKSCAKGRYDIAGIYKGKAGKTSLKSILAGANGEADIEELISRRENDKLAELWVQGADIKWDGLYSDIKPQRMSLPAYPFAKERYWITDNRPKAEKPQAVPTSRVLHPLLHENVSDLTEQRYRSEFTGQETIFTDHLIKGKPVMPGVAYLEMARAAVAQAVKGQKERPSVTRLKNIVWVRPIEAGNRPIEAQISLNPRENGEIVYDVYTDSQTEASGRQIHCQGAAGILSAGEAPHRDIGALKAQCGLSILTSEQCYGLFSKIGIDYGPGQQGIQQIHIGSNQALAELRLPSFLEETADQYVLHPCMLDSALQATIGLKLHADDNQLSLPFALEELDIFSPCTTSMWAYVSSRGTDEKIQRMDIDLCDETGRVCVRIKGISSRMMEGPAPETSLNGANLLAPVWDLAEFRDQSPAYKTEEVVFIAGDEESAAFQLHHPSAKRLHITPEDEIEAVAAELKATGSFGHIVWIAPFHSADDMVKAQDAGVIQMYRVIKAMLALGYGGKRISLTAVTIKTQSVQPADIIDPAHAGIHGLVGSLAKEYPNWQTRLIDAGCPEDVSKAELFSAPFDEQGNTWAYRNNHWYKQRLIPVQQPVSSRPAYQKGGVYVVIGGAGGIGEAWSEYAVKTYQARVVWIGRRKHNSAIQEKIDRLSQFGPAPIYIEADAANPNELTRAYETIKRTHPQINGIIHSAIVLEDQSLANMPESRLKSVLAAKVNVSVNMARVFQNEPLDFALFFSSVQSFARAAGQSNYAAGCSFKDAFAAHLAQVRPYSAAVMNWSYWGSVGIVSSADYQERMKQAGVGSIEAPEAMAALERLLGGPLNQFVMMKQAEEPEEKPEEMIEVYPEHHGSAMQKLRSYQPKVTRHVQQLS

SEQ ID NO: 47 - protein, 2485 aa, Bacillus velezensis
MQNTEDLLYKLLAGQLKSVGFFTENETQPVMQGFYGRWLEESISILVQKGFLKQSGSTYVLTGPIERADVLWQEWDEKKAPLLKDSSKQAMITLVETALRALPDILSGRVSATDVLFPDSSMELVEGIYKNNETADYFNEVLADTLTAFIEERLKEDPNAEIRILEIGAGTGGTSAAVFKRLKEYKHHVKEYCYTDLSKAFFMHAEKEYGPDNPYLTYKRFNVEEPPALQGIEAGAYDAVIAANVLHATKNIRRTLRNAKVVLKKNGILLLNEISSHSVYSHLTFGLLEGWWLYEDAKLRIPGCPGLYPEAWQSALESEGYRYVTFMAESSHHLGQQIVAAESDGVIRQKQPDAQAVEETAASKEQADFTEPSFSVTDRTVQFIKETLAKSIKLAPERIQPETSFEKYGIDSILQVNFIRELETLTGELPKTVLFEHTNTKELAEYLLETYPDKLQQAFGAEQAPPETKHPEPAMNEPVPLVTETRRFITEQKEPKAPKPETETVTVNRSDRDDIAIIGISGRYPESETLDELWEHLKAGDSCITKAPENRWKSGLLKTMAKETRKEEHKTRYGGFLQHIDAFDHHLFDIREDHVMEMTPELRLSLETVWETFENGGYSLERVNEWQESDSGIGVFMGSMYNQYFWNIPSLEKAALSSNGGDWHIANRISHFFNLTGPSMGVTTACSSSLSAIHLACESLKLNSCSMAIAGGVNLTLEPSKYDALERANLLEQGSESKSFGTGTGLMPGEGVGAVLLKPLSKALADKDHIYGVIKSSALCHSGGRQMYTAPDPKQQAKLMAASIDKAGINPETISYVESAANGSVLGDPIEVIALTNAFAQYTDKKRFCALGSVKSNLGHLEAASGMSQLAKVLLQMERETLVPTINAKPQNPNINLEQTAFHLQEKTEYWERMRDAETGDIIPRRSMINSFGAGGAYANLIVEEYISPNSDQARHGDEEYIFPVSAKTKWSFEAYLDRLAAFLEKTPSLHPAAIASALQKRTHHSEYRAAFTAASVQELLEKLAAYRMDQRNLNFSESDIGRRARQWEKGENIAFDQLQQEHAVHLPAYAFDHGTSFQFSESENAAGVQAVYSDDDPYVKGHQFSGEPVLVGATYNSLAVDHFCDLFPEAEGGQIKKLNYVSPITVKKGDRIELKTESKQNGDGFELSIMHRSRTSPDWSIAAYAECSPYPFQKQHADLAAIQRSYREVGRIDELYGDGTGPVVWGEEFKTITRLYKGSDAVLAKVNLNNSDSQQAHHYAVNPFIANSAYLASLSLLDQTEAESYLPFGINSVTFSSPEDLIDCWLHIKLTKQTGEMILINADVISSRSEVVMRFEGYALKRFRPKTEQMNQPARTAVKNAGAPISAGSLTDDIRSYVLGKLAKMMDEPGPSLRSDANIMELGLDSASLIGLTKEIGQEADIDVNPTLFFEYPTAEELTRHFASAYESKFSQLLADHKHSEEARVTETEERTLPRKQHTPCDNADVKQGIAIIGMSAQFPQSPDIQSFWEHIVNGDHCITEIPADRWDWRRYAGDENDTSLRWGGFIDGVGEFDPLFFGISPKEASQMGPEQFLLLMHTWKAMEDAGLTNKALSSRPTGVFVAAGNSDPNNGTAIPSIIPNRISYALNLQGPSEYYEAACTSTLVALHRAVQSIRHNECEQAVVGAANILQSPKGFIGFDSMGYLSKNGRAKSFQKDADGFVRSEGAGVIIIKPLEAAIEDGDHIHMVIKGTGVSHGGKGMSLHAPNPAGMKAAMKKAYEDTDVDPQTVTYIEAHGIASEMADALEFNAIKAGYGESANQEESAPCYISTVKPCIGHGELASGLAALIKVAMAMKHHTIPGIPGFTAANEQMAIQKSRFRFTEDNQEWTQLTDHTGRPIPRRAAINSYGFGGMNAHVVLEQYSPSHKDKESVHEPQLIVLSAKSEGRLKAVASQLDDFVQTGDTLSLRDIAYTLQTGREAMNCRLALVARNQDELLEKLKEYRAFSEESNGMKSFFTGSQQTGSGDIGVLLEGTLGTVVTETLLAENNLEKLAFCWVKGADIPWDRLHQGKSVQRVPLPTYPFENHKYWNGGQPEDISLAPVSQNPQIRCESAADIVADILGMKAAEIDQNKPLTEYGFDSISSIQLLKKLEDGDSRISLEALQKCSTLQEICMLLKTNQPQETGRNFPELVKLNEREKGRPVFWFHGGTGGVEAYQPFAKKSQRPFYGIQARGLTGKEPLQGIEETAASYMRIIQAVQPKGPYDLGGYSLGGMLAYETARLLQEEGHTVKSAVMIDTPYSEKWKERKPSVKSVMLQTINTMLTAYLKPENLEEALISREDITVQAEEEEVLKELIGLAKKRGLPKSEEAIRMQLEQMMKTQLAYGMEEYDMKPLPHPEALQCYYFRNKSGLFLGHLERYLTAEEEQIPLDHDAYWKEWERQMKQFHLLDVHSSNHVTMLSEPKPQNAIKAFCEKLYANKGTISANFLKSFRKKLDETNELVKR

SEQ ID NO: 48 - protein, 403 aa, Bacillus velezensis
MEKTMFHPHSPEFHENPFAVLSRFREQDPIHKFELQRFGGTFPAWLITRYDDCMAFLKDGRITRDVKRVMPKELIAKLNVSEDIDFVSEHMLAKDPPDHSRLRSLVHQGFTPRMIEQLRTGIEQITEELLDEMETKADPDIMRDFAAPLPFIVISELLGIPKEDRAKFQVWTNAMVDTSESGQDATNQALKEFKQYMKTLIEEKRKHPGEDLTSKLIYAEEDGQKLSESELYSMLFLLVVAGLETTVNLLGSGTLALLLHKDQMEKIKRQPENIQTAVEELLRYTSPVIMMANRWAIEDFTYKDVSIKKGDMIFIGIGSANRDPEYFDDPDTLNIARTPNRHISFGFGIHFCLGAPLARMEASIAFTALLKRFPNIELKGAPEDVTWRKNVFLRGLETFPVRF

SEQ ID NO: 49 - protein, 481 aa, Bacillus velezensis
MDIVIILLALGMLMFAAYRGFSVILFAPICALFAVLLTDPSFVLPFFSNIFMEKMVGFIKLYFPVFLLGAVFGKVVEISGLAESIAKTIVKLVGAKRAILAIVLMGAILTYSGVSLFVAVFAIYPFAKNLFIKADIPKRLIPGTIALGAFTFTMDALPGTPQIQNVIPTAFLKTNIYAAPWLGLIGAAFVLTAGMIYLESRRKKAANAGEGYAGFQSEVSAAEESSGLANETHTPVLPQEAEPSPARQVLAFVPLILVGVMNKCFTMWLPHWYPDGFDFAPLGLEAFGKIDLSSVTAIWSVELALFIGIMTTILFDWKKVLFNLKEGLNEGIGGALLASMNTGAEYGFGGIIAALPGFKMVSSGISQTFTDPLVNGAVTTTALAGITGSASGGMGIALSTMSAAYTEAINTFHIPPEVMHRVISMASGGMDTLPHNGAVITLLAVTGLTHRQSYRDIFAITVIKTAAVFVIIAIYSLTGLV

SEQ ID NO: 50 - protein, 233 aa, Bacillus velezensis
MGKGKVMDSYQDAAALIKDGDTLIAGGFGLCGIPEQLILAIRDSGVKNLTVVSNNCGVDDWGLGLLLANRQIKKMVASYVGENKTFERQFLSGELEVELVPQGTLAERIRAGGAGIPAFYTPAGVGTSVAEGKEHKTFDGRTYLLEKGITGNAAIVKAWKADPLGNLMFRKTARNFNPLAAMAGKVTIAEAEEIVDAGELDPDQIHTPGIFVQHVLLGGIHEKRIERRTVRQA

SEQ ID NO: 51 - protein, 220 aa, Bacillus velezensis
MRDSRKRMIKRAVKEIKDGMNVNLGIGMPTLVANEIPNDYNVLLQSENGLLGIGPYPAEGTEDPDLINAGKETITEVKGASYFDSAESFAMIRGGHIDVAILGGMEVSERGDLANWMIPGKMIKGMGGAMDLVHGAKRIIVIMEHVNKYGESKVRTECTLPLTGRQVVDRLITDLAVFDFHDGRMTLTELQEGVTMEEVFEKTEGHFTVSQSLKNGVRPK

SEQ ID NO: 52 - protein, 261 aa, Bacillus velezensis
MHSLLIEKTAVVTGAAGGIGLEIAKEFAREGAAVIISDVNEQAGKEAAARLKDEGCEAVSITCDVTNEKQVADMLQTVEKQFGRLDILVNNAGIQHVAPIEEFPTEQFERLIRLMLTAPFIAMKHAFPIMKKQQFGRIINMASVNGLIGFHGKAAYNSAKHGVIGLTKVGALEGAADGITVNALCPGYVDTQLVRNQLKDISATRNVPYERVLEDVIFPLVPQKRLLSVKEIADYAVFLASDKAKGVTGQAVVMDGGYTAQ

SEQ ID NO: 53 - protein, 400 aa, Bacillus velezensis
MNNLAFLFPGQGSQFVGMGKQFWNDFVLAKRLFEEASDAISLDVKKLCFNGDMNELTKTMNAQPAILTVSVIAFQVYMQEIGVKPRFLAGHSLGEYSALVCAGALSFQDAVTLVRERGILMQNADPHQQGTMAAVTQLSLQTLQEICSKVSTEDFPAGVACMNSEQQHVISGHRQAVERVIKMAEEKGAAYTYLNVSAPFHSSMIRSASEQFQTVLHRYSFRDAAWPIISNVTARPYSSGNSISEHLKQHMTMPVRWTESMHYLLLHGVTEVIEMGPNNVLAGLLRKTTNHIVPYPLGQTSDVPPLSNSTERKKHIVHLRKKQLNKLMIQSVIARNYNKDSAAYSTMTTPLFTQIQELKERMKRHEDVLSEQELEHSIHLCKLICEAKQLPAWEELRILK

SEQ ID NO: 54 - protein, 3982 aa, Bacillus velezensis
MYTSQFQTLVDVIRERSSISDRGIRFIESDKNETVVSYRQLFEEAQGYLGYLQHLGIKPKQEIVFQIQENKSFVVAFWACILGGMIPVPVSIGEDDDHKLKVWRIWNILNHPFLIASEKVLDKIKKYAAEHDLQDFHHQLNEKSDVIQDQIYDYPASFYEPDADELAFIQFSSGSTGDPKGVMLTHHNLIHNTCAIGTALHVHSKDSFLSWMPLTHDMGLIACHLVPFITGINQNLMPTELFIRRPILWMKKAHEHKASILSSPNFGYNYFLKFLKNEPDWDLSHIKVIANGAEPILPELCDEFLKRCAAFNLKRSAILNVYGLAEASVGAAFSKIGKEFVPVYLHRDYLNLGERAVNVSKEDQNCASFVEVGQPIDYCQLRISDETNERVEDGIIGHIQIKGDNVTQGYYNNPESTEKVLTSDGWVKTGDLGFISESGNLVVTGREKDIIFVNGKNIYPHDIERVAIEMEEVDLGRVAACGVYDQKTQSGEIVLFVVYKKSPEKFAPLVKEIKKHLYKRGGWSIKEVLPIRKLPKTTSGKVKRYELARQYEAGNFSTESAAINECLESSPETSGQTPIHEIETELLSIFSEVLNGKKVHLADSYFDMGANSLQLSQIAERIEQKFGRELAVSDLFTYPSITDLAAYLSESRAEIKQDAAAKPSHVTPKDIAIIGMSLNVPGASTKSDFWNLLEKGEHSIREYPESRLKDAADYLKSIQSEFNESQFVKGGYLDEIDRFDYSFFGLAPKTAQFMDPNQRLFLQSAWHAIEDAGYAGGSMNGSRVGVYAGYSKVGYDYERLLSANYPEELHQYIVGNLPSVLASRIAYFLNLKGPAVTVDTACSSSLAAVHMACKSLTSGDCEMALAGGIRTSLLPICIGLDMESSDGYTKTFSKDSDGTGTGEGAAAVLLKPLQDAVRDGDHIYGVIKGSAMNQDGTTAGITAPNPAAQTEVIETAWKDAGIAPETLSFIEAHGTGTKLGDPVEFNGLCKAFEKYTAKKQFCAIGSVKSNIGHLFEAAGIVGLIKSVLMLNHKKNPPLAHFNEPNPLIHFHSSPFYVNQEAAAFTSGDEPLRGGISSFGFSGTNAHVVLEEYISQSEYAPEDEQGPHLFVLSAHTEKSLYELAQQYRQYVSDDSQASLKSICYTASTGRAHLDHGIAMIVSGKQELSDKLTRLIQGDRNLPGVYIGYKNMKEMLPAHKEELNQQAAALIKQRLRTQDERITWLNRAAELFVQGAVIDWRALYSGETVQKTPLPLYPFERSRCWAEADQLRLNEGEKKGGAALNINQSKAHIESFLKTVISNASGIRAEELDLNAHFIGLGMDSIMLSQVKKAIADEFGVDIPMDRFFDTMNNLQSVIDYLAETVPSSFASAPPQENVPAQEIQVISETQSESDRREGHQEHMLEKIISSQNQLIQDTLQAQLNSFNLLRNSGHHSDEKEYAKAQEKSIPSVKQGPPAVTAEKKAAQEAKPYVPFQPQNLHDQGHYTARQKQYLEDFIKKYADKTKGSKQYTDNTRFAHANNRNLSSFRSYWKEIVYPIIAERSDGSKMWDIDGNEYIDITMGFGVNLFGHHPSFITQVIDDSTRSSLPPLGPMSDVAGEVADRIRTCTGVERVAFYNSGTEAVMVALRLARAATGRKKVVAFSGSYHGTFDGVLGVAGTKGGAASANPLAPGILQSFMDDLIILHYNNPDSLDVIRSLGDELAAVLVEPVQSRRPDLQPQAFLKELRAITQQSGTALIMDEIITGFRIGLGGAQEWFGIQADLVTYGKIIGGGQPLGVVAGKAEFMNAIDGGTWQYGDDSYPQDEAKRTFVAGTFNTHPLTMRMSLAVLRHLQTEGEHLYEQLNQKTAYLVDELNRCFEQAQVPIRMVRFGSLFRFVSSLDNDLFFYHLNYKGVYVWEGRNCFLSVAHTADDIENIIQAVKDTVEDLRRGGFIPEGPDSPDGGGRKKSGTRELSPEQKQLVMASHYGNEASAALNQSIMLKVKGELQYTSLKQAVRHIVDRHEALRTVIHPDDEVQQVQERMNIEIPVIDFTGHPHEHREPEIQKWLTEDAKRPFHFHEQKPLFRIHVLTSAHNEHLIVLTFHHIIADGWSIAVFVQELESNYAAIVQGKPISPKEADVSFRQYLDWQQAQIDSGHYEEGVRYWRRHFSEPIQQPILPSTDSVRYPNGYEGDRCTVRLGRPLSEALRSLSIQMKNSVFVTMLGAFHLFLHRLTKQSGLVIGVPAAGQSHMKQHDLIGNCVNMIPVKNTSSSESTLSGYLGSMKESVNLAMRHQAVPMTLVARELPHDQVPDMRIIFNLDRPFRKLHFGKAEAEPVAYPVKCTLYDLFLNITDAHQEYVLDFDFNTNVVSPEIMKKWGAGFTKLLQKMVEGDSIPLDAMMMFSDEEQHDLQALYAEHQKRISSIGSNTANFTEAYEAPVNETERQLARIWEELFGLERVGRSDRFLALGGNSLQATLMLSKVQKTFHQKVSIGQFFNHQTVKELARFIQNETKVVHLPMKAAEKKAYYPTSPAQQRVYFLHQLEPDQLAQNMFGHISITGKYDELALISSLQQVMQRHEAFRTYFDIIDGDIVQKLENEVDFNVHVRTMSRDEFDAYSDRFVKPFRLDQAPLVRAELIKIENEQAELLIDMHHIISDGYSVNILTNELLALYHQKPLPDIEFEYKDFAEWQNQRLNEDAMKRQETYWLEQFQDEIPILDLPTDGSIAAERSSEGQRVTCSLQPDVIRSLQDLAQKAETTLYTVLLAAYNVLLHKYTGQEDIVVGTPASGRNHPDIEKIIGIFIQTIGIRTKPHANRTFTDYLEEVKRQTLDAFENQDYPFDRLVEKLNVQRETTGKSLFNTMFVFQNIEFHEIRHNECTFKVKERNPGVSLYDLMLTIEDAGQQIEMHFDYKPGRFTKDTIEQITRHYTAILNSLAEQPEMTLSSVPMLSETERHQLLTECNGTKTPYPHKETVYRWFEMQAEQSPDHEAVIFGNERYTYRQLNERANRLARTLRTKGVQADQFVAIISPHRIELIVGILAVLKAGGAYVPIDPEYPEDRIQYMLRDSRAEVVLTQRSLLDQLPYDGDIVLLDEENSYHEEHSNLESDSDAHDLAYMIYTSGSTGNPKGVLIEHQGLADYIWWAKEVYVRGEKTNFPLYSSISFDLTVTSIFTPLVTGNTIIVFDGEDKSAVLSEIMRDSRIDMIKLTPAHLHVIKEMNIAGGTAIRKMIVGGENLSTRLAKSVSEQFKGRLDIFNEYGPTEAVVGCMIYHFDAERDKREFVPIGTPAANTDIYVADASRNLVPIGVIGEIYISGPGVARGYWNRPDLTEEKFVENPYVPGAKMYKSGDLAKRLKDGNLVYIGRVDEQVKIRGHRIELGEIEAAMHNAEAVQKAAVTVKEEEDGLKQLCAYYVSDKPIAAAQLREHLSSQLPDYMVPSYFVRLEHMPLTSNGKINRKALPAPEASLQQTAEYVPPGNETESKLTDLWKEVLGISHAGIKHNFFDLGGNSIRAAALAARIHKELDVNLSLKDIFKFPTIEQLADKALHMDKNRYVPIPAAKEMPYYPVSSAQRRMYLLSHTEGGELTYNMTGAMNVEGTIDPDRLNAAFRKLIARHEALRTSFDLYEGEPAQRIHQNVDFTIERIQASEEEAEDRVLDFIKAFDLAKPPLMRAGLIEIEPARHLLVVDMHHIISDGVSVNILMKDLSRIYEGNEPDPLSIQYKDFAVWQQSDIQKRNIKSQEAYWLDQFHGDIPVLDIPADYERPAIRDYEGESFEFLIPEHLKQRLSQMEEDTGATLYMILLAAYTILLSKYSGQEDIIVGTPSAGRTHLDVEPVVGMFVNTLVIRNHPAGRKTFDAYLNEVKENMLNAYKNQDYPLEELIQHLHLPKDSSRNPLFDTMFVLQNLDHAELTFDSLQLKPYPFHHPVAKFDLTLSIQADRDNYHGLFEYSKKLFKKSRIEVLSNDYLHILSAILEQPSILIEHIGLSGSNEEEENALDSIQLNF

SEQ ID NO: 55 - protein, 5374 aa, Bacillus velezensis
MSVFKTQETYWENLFDEEDGLSAFPYFKAADKASLVRTGYQEKCICRSLSPEVSQRIMTMANHSDMAAYLILLAGIECLLYKYTDRTSLILGIPTVSKQKAGQSAVNNIVLLKNTLSNESTFKTVFGQLKEAVNDSLKNQNLPFRKMARHLSVQYNDEHMPLIHTVVSLNEIHSLQCKEDTATDTLFHFDLENNGIHLKLFYNGNLYDERYINQIVSHLDQLLSVILFQPQAAIHTAEILPEAQKQKLLFDFNDTVRDFSGSRTVYQLFEEQAERTPENAAVKFKNDHLTYRELNEKASRLARTLRNCGVQPDTLVAILADRSLEMIVSIIAVWKAGGAYVPLDPEYPKERLQYLLHDADADVLLVQHHLKNSLAFDGPVIDLNDEASYHADCSLLSPVAGHSHLAYVIYTSGTTGKPKGVMVEHGGIVNSLQWKKAFFKHSPADRVLVLYPYVFDAFILNFFGPLISGATLHLLPNEENKETFAIQNAIKQERITHFSTSPRLLKTMIEQMNREDFIHVQHVVVGGEQLETDTVEKLHSLQPRIRINNEYGPTENSVVSTFHPVQSADEQITIGSPVANHQAYILGAHHQIQPIGIPGELYVGGAGVARGYLNRPELTEEKFVEHLHVPGQKMYKTGDLARWLPDGRIEYLGRIDHQVKIRGYRIEIGEVEAAMFNLENVREAAVVAREDADGAKQLYAYYVGEPSLTAAQFREELSRELPNYMIPSRFIPLERIPLTSNGKIDLKALPAADENTRAENEYIAPRNTIEELLASIWQEVLGAERIGILDNFFDFGGDSIKSIQVSSRLYQAGYKVDMKHLFKHPSIAELSQFVAPVSRVADQGEVNGGTKLTPIQHWFFEQKMPHAHHYNQAVMLYSAEGFKEGPLRRTMERIASHHDALRMIFEKTPDGYAPRITGTDESELFHLEVMNYKGETDPAQAIADKANEIQSSMVLDKGPLMKLGLFQCPDGDHLLIAIHHLLIDGVSWRILLEDFASGYEQAERRQTIQLPQKTDSFPFWADQLSKYAAETDMEEEIAYWTELSSIKPQPLPKDTISEGSLLRDSEEVTIQWTKEETEQLLKQANRAYNTDINDLLLTSLGLAVHKWTGTEDIVVNLEGHGREPIIPDADISRTIGWFTSQYPVVLRMEAGKNLSQRIKIVKEGLRRIPDKGMNYSIIKYISGHPEADSLQLKPEISFNYLGQFDQDLKHQALRISPFSTGLSMNENQERTAVLDLNGMIAEGTLSLTLSYSSKQYERSTMAQFARGLKESLQEVIAHCVSRQQTSLTPSDILLKDISIDELEQLLEQTRELGEAENIYPLTPMQKGMLFHSLFDPNSGAYFQQTMFDLHGDLEIDSFSKSLDGLSQKYDIFRTNFYRGWKDQPLQIIFKTKKIGFQFNDLREMKESQKEAMIQKYAREDKMRGFDLEKGALMRLFILRTDEKTYRFIWSFHHILMDGWCLPLITKEIFENYFALLQQKQPEQSSITPYSQYIEWLGRQDAKEAAAYWDQYLEGYEEQTGLPKDHHAAEDGRYVPEKVTCDISSDLTSKMKRTAGKHHVTLNTLLQTAWAVLLQKYNRSRDVVFGSVVSGRPAGIPNVETMIGLFINTIPVRFRCEAGTTFAELMKEAQERAVASQKFETHPLYDIQARTTQKQDLITHLMIFENYPVDQYMESIGRQNGTSITISNVQMEEQTNYDFNLTVIPGDEMNISFEYNANVYERASIERVREHFMQILHQVVTDADIRVDQAELLTEGERRTLLQTLNDTAAPFPQTPVHQLFEEQSQRTPDQAAVIDKDRQLTYGELNKRANRLARTLRAKGVQTDQPVAIITRNSIESVVGILAVLKSGGAYVPIDPEYPQDRIRYMLDDSQAGIVLMQRDVRKQLAYEGVTVLLDDESSYHQDGSDLAPISDVSHLAYVIYTSGSTGRPKGVLIEHGGLTNYIWWAKEVYVKGEKANFPLYSSISFDLTVTSIFTPLVTGNAIIVYDGEDKTALLESIVRDPRVDIIKLTPAHLQVLKEMNIADQTAVRRMIVGGENLSTRLARSIHEQFEGRIEICNEYGPTETVVGCMIYRYDAAKDRRESVPIGTAAANTSIYVLDENMKPAPIGVPGEIYISGAGVARGYLNRPELTAEKFVDDPFEPGAKMYKTGDLAKWLADGNIEYAGRIDEQVKIRGYRIELGEIEAALLQEEVIKEAVVTAREDVHGFKQLCAYYVSGGQTTAARLRKQLSQTLASYMVPAYFIELDEMPLTSNGKINKKGLPAPDFELQDRAEYKAPRTKAEEILVSAWESVLGAENVSILDNFFDLGGDSIKSIQVSSRLNQQGYKMEIKDLFQYATIAELSPHIKQNLRIADQGEVKGKVSLTPIQHWFFEQTTTDQHYYNQAVMLHAPEGFQETQLRQTLQKLAEHHDALRMTFRTTENGCEAQNEEIAQSGLYRLEVMNLKEDPDPGRTIEAKADEIQSSMHLSDGPLMKAGLFQCADGDHLLIAIHHLIIDGISWRILLEDIVSGYKQAENGRVIQLPQKTDSFQLWAKRLSEYAQSETIKQEQEYWTKIEQTEVKPLPKDFHETHTTAKDSETATVEWTKEETELLLKQANRAYHTEINDLLLTSLGLSISHWSGLEQIPIHLEGHGREQIIQDIDISRTVGWFTSLYPVVLHAQPGKEISDYIKTTKEGLRQIPYKGIGYGIARYLSGGMPSKLNPEISFNYLGQFDQDLQQHGVQLSSYSCGSDSSGNQERPYVLNINGMITEGRLKLTISYSSKQYAKETIMRLSETIQSRLRTIITHCVHKEQSELTPSDILLKGISIDELDQLLIQLPHAGEVENVYPLTPMQKGMLFHSLLDEASSSYFEQASFDLQGELKIDWFKASLERLFETYAVLRTRFYSGWNDTPLQIVYKTQTPQIHFADLRDIEEHLREDAIAAYQREDKAKGFDLARDPLMRIAIFRMEDRKYHLIWSFHHIVMDGWCLSLITKEVFDHYSALQEGREPEPPSAAPYSDYIEWLDRQDQGAAKRYWSGYLEGYKGETTLLHKIAQHEQKEYAYANVICRFDHEQTKQLQQIANQHQVTLNTLIQTLWGILLQKYSGSADVVFGSVVSGRPAEIPDVEQMIGLFINTIPVRIRCDEDSTFADTMQMVQQNALASQSYDTYPLYEIQAQTEQKQNLIDHIMIFENYPIGQQVEEGHDAADLNIVNFHIEEHTHYDFNVVVIPGEQLTVHFSFNRNEYEQSEAERIRGHFEQLMQQVLQLPSVKVEEMELLTQQEKEQLHSRFQSNEMHYPREQTIHQLFEEQALRTPDHEAVIFEEQRMTYLELNERANQLARTLRVEGLQADQLVAIMAERSLEMMVGIYAILKAGGAYVPIDPDYPEERIRYILEDSGATLLLSQRHVKERVAFAGTVIDLDDTSVYDDDVSNLDPLSGAGDRAYVIYTSGSTGKPKGVMVEHRPVINRLMWMQKAYPIGSGDTILQKTAITFDVSVWELFWWALTGAKVCLLPLGGEKDPEVIWNTIEEQSITTMHFVPAMLHAFLKFAETQTASGQTSKLRTLRQVFASGEALMPAHTARFHRLITPVNGAQLINLYGPTEATVDVSYFNCEANQAYASVPIGKPISNIQLYMMAPGSMRLQPVGVPGELCIAGDGLARGYLNRPELTAEKFADHPFEPGKRMYRTGDLARWLPDGNIEYLGRIDHQVKIRGYRIELGEVEAQLLKIESVQEAVVTALEDGDGEKQLCAYFSANTELMVSELRIALSQELPGYMIPSYFIQLERLPLTANGKIDRKALPAPEGGVQTGIEYVAPRTAAEAQLAHIWQEVLGLPRIGVKDNFFDIGGHSLRATTLTAKLHKEMGVSLPLREVFRSPTIEEMAETITGMKHTAYTSIPTVEAKEYYAVSSAQKRLYILNQLKGGELSYNMPSVMRADGALDRELVEKAIRKLIQRHETLRTGFELIDGEPVQRIYDDVQFAVEFTQAKEEQAEALVHGFVRAFDLEKAPLLRVGLIELAKDRHLLLFDMHHIISDGVSIKNLIEEFVSLYEGKEFPPLRVQYKDYAAWQLSDMQSERMKKQEAYWLDVFSGEVPVLDMPTDYGRPAARSFDGGQIEFVIGPELTEQLKGLALKSESTLYMVLLAAYTTMLAKYSGQEDIVVGSPIAGRTHSDLESLIGMFVGTLAIRTNPVGEKTFREYVQEVKEHTLKAYENQEYPFDELVDKLNVSRDFSRHPLFDTMFIWQNTEQGELSLDDVRFTPYPDNHAMAKFDLTFQAAENEDGITGMISYAAALYKQETAERMAKHFIQLIEAIANDPQAPLSSLEMITAQEKEQIVERWGQPAIDCPRDKTIHQLFEEQAERTPEHTAAVYEKSRFTYRELNERANRLARILRSEGVHPDQPVGILAERSLEMIVGIMAILKAGGAYVPMDPDSPQERLRYILEDSGAKVLLAQPHLQDRVSFAGEILLLNDERMNSGDGSNLVTAAGPDHLAYVIYTSGTTGKPKGTLIEHRQVLHLMEGIRGQVYGAYDSGLRVSLLAPYYFDASVKQIFAALLGGHALYIVPKASVSDGYALSNYYRTHRIDVTDGTPSHLQLLIAADSLHGVTIRHMLIGGEALPQATVAQLLELFASNGSSMPLITNVYGPTETCVDASVFHIVPETLASADDGGYVPIGKPLGNNRVYIVDSHDRMLPIGVKGELCIAGDGVGRGYLNLPELTGEKFVADPFVIGERMYKTGDLARYLPDGNIEYAGRKDHQVKIRGYRIELGEVEAALLNIEHVQEAVIVARENAEGQSDLYAYFTGEKSLPINQLKEKLSDQIPGYMVPSYLMQLEQMPLTSNGKVNRSALPLPEAGLQTGIDYVAPRTRPEEQLVHIWKEVLKVEQVGVKDNFFDLGGHSLRGMTLVTKIHKQFDKSISLREVFQYPTIEEMARVIAGAETSGPDEIPVAEAKDVYPVSSVQKMVYLSTQIEGGELSYNMPGILTLEGRIDMNRLQSAFQSLIQRHESLRTGFEMVRGELVQVIKPQADFSIERYKAADEEVEELFRNFVRPFDLSQAPLLRAGLIELEQDRHVFMFDMHHIVSDGASMNIFVEELIQLYDGKELTPLRIQYKDYTVWQQQAEQRERIKRQENYWLNVFHEELPPFELPKDFARPRIRSFEGKRYNFALDETVVQGIKQMEELTGSTAYMILLSAYNILLAKYSGQEDIVVGTPIAGRMHEDLQHIIGMFVNTLAIRTAPAGEKTFMDYVTETKETMLKAYENQEYPFEELVEKLGVKRDLSRNPLFDTMFVLQNTEQTDIELDSLAVRPYEQTNTAAKFDLQLTFVMNPHEIQGSFEYCTKLFKQKTIATLSKDYAMILSAIIKDPSIPLKEIQLSEKVNKSEHFANEIELNF

SEQ ID NO: 56 - protein, 2619 aa, Bacillus velezensis
MSEFKQQELFWSSMFDAEDRPSAIPSFQMSDSAIEHDASSAPNRIHSSLSPDVSLRIMKMTNKSPMAVYMVLLVGIECLLYKYTGEEGVIVGVPTFEDETDEDLRLDQVMLIKQNINADSTFKSIFNEFKHTLNGAILHQHVPFDKMAGPLNLNYDSNHLPMIHTIVSLDQLHPIRFRETAASDTLFQFSIENDSIHLKLTYNEQAYDRQYMMQVIEHVNRIFSILLFQPDLMIRQLNILSDSETNQLIAYNQTAAEYPREKTIHQFLEEQAERTPDQTAVVYEDSRLTYRELNERANQLARTLQSEGVQPDQPVGIMAERALDMIVGIFGILKAGGAYVPIDPGYPEERVRYILEDSDTKLLLVQNQSQERVPFTGKVLDMKDPQNFCEDGSNVEPAAGPDHLAYVIYTSGSTGKPKGVMVEHRSVINRLVWMQEKYPLDERDAILQKTAITFDVSVWELFWWTISGSRLVLLPNGGEKNPELILDTIAQKGVSTMHFVPAMLHAFLESMDQKPSGMLKQKLASLRHVFASGEALKPVHVAGFKHIITSVSQAQIINLYGPTEATIDVSYFDCQTEETYASIPIGKPISNIQLYILHADLEHMQPIGVAGELCIAGDGLARGYLNRPELTAEKFVNHPIASGERIYRTGDLARWLPDGNIEYLGRIDHQVKIRGYRIEIGEVEGAFFQLPAIKEAIVIAREIEGETSLCAYYTAQHALTAGELREELSRQLPSYMIPAYFVQLEEMPLTFNGKIDRKSLPSPRENLTGMNYEAPRTELEKILAAVWESVLGLERVGISDHFFELGGDSIKSIQVSSRLYQAGYKFEIKHLFKYPTISELVPYVEPVTRIAEQGEIKGRALLTPIQHWFFDQKYPELHHYNQAVMLYWKEGLDESKLRDVMKKITEHHDALRMVYVPTEDGYEARNRGIDEGDLFSLEVISLREEKNVSQTIETISNEIQQSIHLAEGPLMKLGLFRCQEGDHLLIAVHHLVIDGVSWRILLEDIAAAYEQLQNGEAIRLPKKTDSYLLWAEQLNRYAESQEFEAENQYWFRQKHNPQLTLPKDNEQETGLAKDKETVIVQWTVEETERLLKNAHRAYSTDMNDLLLTGLGTAIHRWTGYEDILIDLEGHGRESIIPDLDISRTVGWFTSLYPVSLQIKADQDIPQRIKTVKENLRQIPQKGIGYGLIKYLSDHPKAHEWTGHPEIRFNYLGQFDQDVRNGRMEISPYSSGKTASDNRTMTYTLDINGMISDGRLSLAISYCGKQYQRETMEACADLLKSSLQQVIAHCDAQDQIHLTPSDISLKGITIGELDQFVQQTSHLGDIENIYPLTPMQKGMLFHSLIDSASEAYFEQAAFDLKGFLDIDAFRMSLAHLAEKYDILRTLFYTEWKDQPLQIVFRQKPIETAVEDIRSMNSHQRSEFIADFARRDKARGFNLTRDALMRVSILRTEEDQARLIWSFHHILMDGWCLPLVTKEVFETYYAILEQRQPKRGAVTPYSRYIEWLDQQDHKQASAYWRNYLEGYEGQTVLLQEQTSDRAKGYEKGEHEFRLGKRLTDEIKRAASRQQVTVNTWIQTAWGLLLQRYNGSQDVVFGTVVSGRPAEIPGIETMVGLFINTIPVRIHTQPEMTAAQVLKMNQERALASQKYDTFPLYDIQAQTEQKQQLINHIMVFENYPVEKQIEHMKQDDNALDILDFHMEEHTHYDFTFIVMPDGEIDIRFVYNRDVYDQASVERMQTHFIQIMKQMADDQEIRVQDLDIVTADERSLLIDKFNDTAAEYPKEKTIHQLFEEQAERTPEQAAIVFEDKKLTYRVVNERANQLARTLVAKGLQAEELVGIMAERSPEMVIGILAILKAGGVYVPIDPDYPKERIHYMLEDSNVSILLLQHHLLEGTDYQSHTVFLDDPSSYGAEASNLNLNVMPNQLAYVIYTSGTTGNPKGTLIEHKNVVRLLFNNKNVFDFNASDTWTLFHSFCFDFSVWEMYGALLYGGKLVIVPKQIAKNPERYLQLLKSEAVTILNQTPSYFYQLMQEERADPESNLNIRKIIFGGEALNPSFLKDWKLKYPLTQLINMYGITETTVHVTYKEITEREIDEGRSNIGQPIPTLQAYILDEYQRIQVMGIPGELYVAGEGLARGYLNRPELTAEKFVEHPFAAGEKMYKTGDVARWLPDGNIEYLGRIDHQVKIRGYRIEIGEVEAALLQSESVKEAVVIAIEEEGSKQLCAYLSGDDSLNTAQLKSHLLNKLPAYMIPAYFVQMEKMPITANGKIDRKALPAPEGNRLTGTEYEAPGTLVEKQLAEIWENILAISEPGIKDNFFDVGGHSLKVLQVIHQINDRMGIKMHYQAVYDFPTIETMARAIQAAVFKSTTDNVFVKMNQSGSIPVFCFPPLIGYGLVYNEMAKRLNGSCIVYAADFLEEPSYEQEIVDRYAESMIGIQEQGPFVLLGYSSGSNLAFEVTKALEKRGRIVSDIMMLDSKRAVSVNYFSEEETEEIIHRNLDIIPDYYRELLTIPSIKDKIRSYLTYHNKLINSGAVNANIHHFLCGELTDRGWKQSTAQHYLEYKLKGDHVTIFDPHNIEENTDTIRSIIKRIEERHHHGLVLEEQLSMGSFAGDTKFDKM

SEQ ID NO: 57 - protein, 511 aa, Bacillus velezensis
MKKCSVCLLILALLLSCLPGEYANAVSTPIAKHVGNSNPLIDHHLGADPFALTYNGRVYIYMSSDDYEYNSDGTIKDNSFANLNKISVISSADMVNWTDHGTIPAAGANGANGGRGIAKWAGASWAPSAAVKKINGKDKFFLYFANGGGGIGVLTADSPTGPWTDPIGKALVTPNTPGMSGVVWLFDPAVFVDDDGTGYLYAGGGVPGGSNPTQGQWANPKTARVMKLGPDMTSVAGSASTIDAPFMFEDSGMHKYNGKYYYSYCINFGGAHPADKPPGEIGYMTSSSPMDSFSYRGHFLKNPGAFFGGGGNNHHAVFNFKNEWYVVYHTQTVSSALYGAGKGYRSPHINKLVHNPDGSLQEVAANFAGVKQLSNLNPYHRVEAETFAWNGRILTEASSAPGGPVNNQHVTNIHNGDWIAVGNADFGSGGARTFKANVASALGGKIEVRLDTANGKLVGTLNVPSTGGTQSWREIETAVSGASGVHNVFFVFTGTGTGNLFNFDYWQFTQR

SEQ ID NO: 58 - protein, 423 aa, Bacillus velezensis
MISSVKKTICVLLVCFTMLSVMLLGPGVTEVSAASDATVNISAERQVIRGFGGMNHPAWIGDLTAAQRETAFGNGQNQLGFSVLRIHVDENRNNWYKEVETAKSAIKHGAIVFASPWNPPNDMVETFNHNGDTTAKRLRYDKYAAYAQHLNDFVNFMKSNGVNLYAISMQNEPDYAHEWTWWTPQEILRFMRENAGSINARVIAPESFQYLKNISDPILNDPQALRNMDILGTHLYGTQVSQFPYPLFKQKGGGKELWMTEVYYPNSDNNSADRWPEALGVSEHIHHSMVEGDFQAYVWWYIRRSYGPVKEDGMISKRGYNMAHFSKFVRPGYVRIDATKNPEPNVYVSAYKGDNKVVIVAINKNNTGVNQNFVLQNGTASQVSRWITSSSSNLQPGTDLKVTDNHFWAHLPAQSVTTFVVKR

SEQ ID NO: 59 - protein, 491 aa, Bacillus velezensis
MKTYVKRLSAVILLLVIAAVPYIDEAAKAAEQKNTLQKELEHILDEEPALKGVSAGVSVRSAKTGEVLFGSREDMRLRPASLMKLLTASAALSVLGEDYTFKTEVRADGAVKGKQLRGNLYLRGKGDPTLLASDFEKMAKQVKARGIHVIKGDLIGDDSWYDDTRYSVDLPWSDEGQYYGAQVSALTASPNEDYDTGTVIAEISPAKQPGKKPRISISPHTDVVRVKNEVKTVASDEAKELTVEREHGGNVITIKGTIPAGSAKAREWAAVWDPSSYALDLWKQALTKQGITVKGKIRTGRMPHRTQLVTSRTSMPLSELLIPFMKLSNNGHAEILIKEMGKVKKGEGSWEKGLDVMKSELKSFGLNPDKLIARDGSGVSHINGVSAGQIGELLYAVQKEKWYPAFLRSLPVAGASDRMTGGTLRHRLKNTPAEGKIKAKTGSLTSVSSIAGYADTKTGDTLIFSVLQNGLLDEDDGKDIEDKIAVVLANQ

SEQ ID NO: 60 - protein, 2544 aa, Bacillus velezensis
MENTVYSLTHAQRRVWFTELLEPGTSICNLAACVKFRGDIDFDVLRHALDFSISQNDSLRFQLTEGDGSEPQLYLAGHRPISLETVDFTHTDQAERDAWIDTQTRVPFKLFHSPLYQFTLLVMSDEEVWLYSKFHHIIMDGISLNLLGNQLIDIYQKIMRSEDLTEHHRPSYLSYMEKEQQYLQSSRFQKDRSFWTETYRTVPEHLSLAERTSHLRQSTAASRDTITLSHSLEQSIRLFCKENNISIISLFMASLYICISRLTAKKDIAIGTYYGNRGSRLEKDMLGMFVSTLPIRMTADPDAEFLSFVRSVGKEQLSVMRHQKYPYNLFVNELRQTHHDLQNIIGISMQYQPLEWRKADGFDYETAMFFSGHTANELSILIKERTDTGLIELNFDYQSALFTETSIKRIQTHLLTIVENAVRNPDRLIRHIDMADEKEKKRVLSSFNRTEAVEPPAPTLHGLFTRRAALSPHRPALRFPGGMLTYAELDQYTDRLAVWLRQKGVRKESMVGVLAERSPEMVVSVLAVLKAGGAYVPLDPEYPEDRLRYMLDDCGACLLLAQPGLSVSGFSGETLEVSLSALTGETETGAVSEEADSDSLAYIIYTSGSTGTPKGVAVEHRQAAAFLSGMQGQFPLTEEDIIVLKSSFSFDASIWQLFWWTMSGASVYLLPAGWEKDPVRMIEAFASEKVTTAHFIPAMVNSFLDALETEPAETRTRLGRTLTRVFAGGEALSPLTAARFADLLPETVLIHGYGPTEATVDAAFYVCDRKRDSGRTRLPIGKPVPGARLYVLDSGGTIQPAGVAGELYIAGTGVARGYLNRSELTEERFLDDPFYPGERMYQTGDIARWTEDGLVEWLGRSDGQVKVRGYRIEPGEIEAAIRRIDGIREAAVTARTEHGETALYAYIEGRESDDVRAELATRLPAYMMPAQFIEMSEWPVTPSGKLDRRALPAPGGAADRQAYNAPRNVTEMKLCALWEEVLKNGPVGIRDHFFERGGHSLKATALVSRIAKEFGVQVPLQDIFARPTVEELASVIQDLEESPYEAIQPAQTQDTYPVSSAQKRMYVLQQLEDGGVGYNMPAVLELTGPLDRGRLEETFRQLVERHESLRTSFETGPDGEPVQRIHDSVPFQLDEAESADAFVRPFCLEEAPLFRAALVKESDERHLLLTDMHHIISDGVSVNTLIKEFGELYAGRSLAPMRLQYKDYAVWQRSFQEKEGYQKQEAYWLKRLEGELPVLELPADKPRPAVRSFAGGSVSCALDAETASGLHRIARDHGSTLYMVLLAAYNTLLARLSGQEDIIVGSPIAGRPHKDLEPILGMFVNTLAIRTEPKGDKRFTDYLAEVRQAALEAYEHQDYPFEELVERLGVQRDTSRNPLFDVMFVLQNMERESLVLNKLHLAQAADTSHKTAKFDATLYASEGSDGSISFDFEFNTDIYQKQTIEKWLSYFTRILTKVIENQAIPLGDIHVLDDAETNRVIYQFNQTKSDYPRHETISRLFERQAKETPDARAVVYDGQILTYRELNERANRIAAALRSNGVGPESVVALLTGRTTELASGILGILKAGGAYLPIGDDVPRERAEWMLKDCKADILLQSGKLDGLPLSGKRLFIEDIQTKAGLSSENPEPLGGPDSLAYMIYTSGSTGAPKGVMIEQRSVIRLVKNSNYIDFTPEDRLLFTSSLGFDVTTFEIFGPLLNGASLYVSDQETYLDSDVLETFIQQNGITTLWLTSSLFNHLSEQNEHVFSGLSRLIIGGEALSPSHVNRVRNALPHLSVWNGYGPTENTTFSTCFLIEQLYDHSIPIGRPVGNSTAYIINSRGTPQPIGVIGELCTGGDGVARGYFGRPELTEEKFVPNPFVPGERMYRTGDLARWLPDGTIEYAGRMDDQVKIRGYRVELGEIEAALRGLDGVKEAAVSVRTGQSGNKELIAYMSLQADMDTEKVRSSLSKQLPNYMVPAYMMELEKLPLTPNGKLDRKNLPEPELALQTAYTAPRNELEEQLSVIWQEVLGTKQVGIEDSFFELGGDSIKALQVSARLGRYGWKMTASDLFRHPSIKELAPLIRKAERVIDQRPVEGNIPWTPVQHWFLSQRMENRNHFNQSVMMFSSDALHKQPLKEALEHLVIHHDALRITVSAENESFRQINHGIQKDELYSLDIWDLSETDTWEKEIESEVAALQQRMDIEKGPLLKAGWFKTRSGDYLFITVHHLAVDGVSWRILLEDLSAAYTQAVKGQPVQLPPKTDSFKQYAERLSEYAKSSKLMREEEYWRFIEEETAAELPYEKPQHQTGVDSIRQTVSFTLTEEETSVLLQQVNRAYHTDTQDILLTAAALALRDWTGGGRLRIAMEGHGREHIMPELDISRTVGWFTSMYPVLIDLNTAGAELGTAVKTVKDTLGRIPDKGIGYGILKYMTPPEQKTIRFRQAPEISFNYLGQFNDTEDQHTFSLSGLASGHDITPTWQREQAVEMSAMAAQNKLHFSLSYPPSRFRKETMEQLLQTLQQYLRDIMAHCTGKEEAEKTVSDFSSKTLTSDDLDSIASFVEEL

SEQ ID NO: 61 - protein, 2242 aa, Bacillus velezensis
MTKKNAIQDIYPLSYMQEGMLFHSLLQKESQAYAEQASFSITGKVDTRVFEESVHALFERHDIFRTIFISQNVSVPQQVVLKERNVSIIEENLTNLNKADQIKHIEEAKRRDRKKGFHLQKDMLMRVTLLQTGECEYTCIWSFHHIIMDGWCLGIVLKEFFQIYASRLRRTPLTLEPAVPYGTYIKWLMEQDKEKAASYWERYLEGFEQQTVLPKQKKAGESRQEEMTFSFSKEDTAKLKELAVKEEVTLSTIFHTLWGILLQAYNQTEDAVFGSVISGRPSEIEGIERMIGLFINTVPVRISGANIPFQKLIKNVQKDALKGQAYSYHPLYDIQANSQVKQGLIDHILVFENYPVEQELDVLNSKGDTKDLFHIHDFSMEDETNYSFYLMVAPGDEIHLKMRYDSSMYDRQFIENIKGHLAHIVSQVLDKPDITPDKLAIITPGEKAQLLAPISEETEKPEYDTVHAMFERQAAKTPDQIAIRYEGESVTYKELNESANKLARLLQKRGLKREEPVGVMLGRSPSLAAAVLGILKAGGAFVPIDPGSPKERIRYVIENSGCVHVVTERHQSVPAEQTLQVTYIEDAGTEADGSNVQSINTADDLLYMIYTSGTTGKPKGVLLEHKNMANLLSHQLTNTDIDFCTNVLQYASVAFDVCYQELFSVLLSGGTLCIVPESIKRDVSQLFSFIDQHNTEVVFFPTAFVKMLFNEEGYAQSFPRCVKHVITAGEQLTVSRLFRQTLRLHGMHLHNHYGPSETHVVSTYTISAGDDIPEHPPIGKPIHHNKMYILSKNRQLQPLGIAGELYISGANTGRGYVNNPALTEEKFLPDPFRTDAVMYRTGDLARLRADGQIEYIGRTDDQVKIRGYRIEPKEIETVLANHHAVKEAAVLIQTNESGENELCAYCSVSQATDPSQLRSDLAKELPDYMIPVKWAFVDSIPLTANGKVDQRALPEASAYTAVRRYTAPRNVTELKLTRIWEEVLQSGPIGVHDHFFELGGHSLKATALVAKIAKECSVQIPLSDVFSHPTVEELAKIISEAEENPFASIEKTEMKETYPVSSAQKRMYVLHQLENGGVSYNIPAVLEVKGPFDRDRMEAVFKELIRRHEPLRTSFEEKNGLPVQGIHDDVPFAFTKEQSAEAFIRPFDLGKAPLFRAGFVQIEKDRHLLLADMHHIISDGVSVNLLIREFSELYAERSLPPLRIQYKDYAVWQQSFMAGAAYRKQEEYWLNRLAGEIPVLELPADKPRPPVRSFSGDRVSFVINEKHTAQLKKLAKENKCTLYMTLLGVYTVLLARLSGQEDMIVGSPIAGRPHADLDAVLGMFVNTLAFRTRPDGSMTFKEYLKEIRQTALEAYEHQDYPLEELVDKLGVPRDMSRNPLFDTTFALQNMEQQKLRAAGLELQPADVSLPISKFDLSLYISENAGELYCQFEYSTDLFKRKTIQKWAGFFTTLAENAAADPGLELDDISVLTEKEEVSLLQDFSPFQKTAFPLHQSLHDLLEQQAEKTPDRPAILTDDISITYQELNERANELAHQLIKRGIRLEDKTAIMGRRSPDMMIGIYAVLKAGGAYLPIDPDYPEERIRFLLKDSGVKFLLAEPELFAPDLFEGETLSLKSGQTGNPEAAANPNVPVKPDSLAYIIYTSGSTGRPKGVQVEHRSAVNFLYSLQTRYGLSDSDIILHKTSYSFDASIWELFWWPIAGASVFLLPQGGEKDPEMILNALENNRITAAHFVPSMLHAFLEYINSRKQPIKKTCLKRVFAGGEQLGPHLVSRFYDLLPGTELTNSYGPTEATVEAAYFDLPQGKEFHNVPIGISGHNMRLYILNQKKRLLPPGCIGELYIAGTGVARGYLNRPELTEERFLDDPFYPGERMYQTGDIARWTEEGLVEWLGRSDGQVKVRGYRIEPGEIEAAIRRIDGIREAAVTARTEHGETALYAYIEGRESDDVRAELATRLPVYMMPAQFIEMSEWPVTPSGKLDRRALPAPGGAADRQAYTAPRNVTEMKLCALWEEVLKNGPVGIRDHFFERGGHSLKATALVSRIAKEFGVQVPLQDIFARPTVEELASVIQDLEESPYEAIQPAKKQDTYPVSSAQKRMYVLQQLEDGGVGYNMPAVLELTGPLDRIRLEETFRELVERHESLRTSFETGPDGEPVQRIHDSVPFQLDEAESADAFVRPFCLEEAPLFRAALVKESDERHLLLTDMHHIISDGVSVNTLIKEFGELYAGRSLAPMRLQYKDYA

SEQ ID NO: 62 - protein, 1518 aa, Bacillus velezensis
VIQDLEESPYEAIQPAKKQDTYPVSSAQKRMYVLQQLEDGGVGYNMPAVLELTGPLDRIRLEETFRELVERHESLRTSFETGPDGEPVQRIHDSVPFQLDEAESADAFVRPFCLEEAPLFRAALVKESDERHLLLTDMHHIISDGVSVNTLIKEFGELYAGRSLAPMRLQYKDYAVWQRSFQEKEGYQKQEAYWLKRLEGELPVLELPADKPRPAVRSFAGGSVSCTLDAETASGLHRIARDHGSTLYMVLLAAYNTLLARLSGQEDIIVGSPIAGRPHKDLEPILGMFVNTLAIRTEPKGGKRFTDYLAEVRQAALEAYEHQDYPFEELVERLGVQRDMSRNPLFDAMFILLNMEREEINLAGLKASRSEHTEHDVSSFDLTLSAAESDGNIRFEMEFSTELFKKETIERWMGHLLNLLRHVAAEPEVTLSKADILDEEEKQKLLIEFNNTQTEFMEKHKLFHQLFEEKAEETPHQTAVIEGTQQISYSQLNERANRLARTLHKNGFGPGKRAAILANRSIEAIVSVLAVMKSGGAYIPVDSHYPEERIRYLLKDSAASVLMVQSEYKELASQLTDHNLFLIQLDHEDQYDICAKNIQPAASPDDTAYIIYTSGTTGTPKGVEVRNRSFTHAALAWRRIYELDLIPVRVLQMASFSFDVFSGDLARALLNGGTLVICPDDVRLEPQQLYRLIDQYRITFMESTPALIVPFMEYIYRRKLALQSVKILVLGSDMIKSQDFYTLHERFGKEMRIINSYGVTEATIDSSYYEAEMSEKPREDDVPIGVPLPNVQMYVLNKDKQVQPIGVFGELYIGGAGVAKGYWGQPELTEGAFSDPLQTGETLYRTGDQACWLPDGTLRFKGRIDKQVKIRGYRIETGEIESVLLKHDQVKEAAVTVMKDAEGQARLAAYIVPKEADISSLRQSLMQELPAYMMPSHIIGLDSMPLTLNGKLDKSALPAEEIHSSQAFVAPGDEKQAMLCRIWEDVLHIQKAGIHHSFFELGGDSIKALQVSARLAGEGWNMSIRDLFQFPTIAELAKHLTPAVATADQGPIEGSAPLTPIQQRFFEEPGAFELHYNQAVMLCSEDSLEIDALYQAVCALTEHHDALRMTFTENEHGETVQYNRGITKQYEEIFTLNVIDISEETQPEKRIAAEEKEIQQAMRLDQGPLLHLGVFRQKEADHLLITIHHLIVDGVSWRILLEDLQTAYQQALDGKQIELPPKSDSYIKYAEELFDISKSKALLEEAAYWDSVMSSETAPLPKITDENAGRLQENARTASWILSSEVTKQLLLETQQAYGTDVHELLLTALGMALHEWTDSEQMLISTEGHGRQGHMPDIDMSRTAGWFTSVYPVLLDMRVPGGSGEKTAHRIKTVKDMMRRVPHHGTGYGLLRYSRNILYKDPEISFNYLGAFDGLEGTLKMSPFKPQHDIAAGRIREFDLDINAMVAAGQLEVKAVYTDVFAPGAIEFFMNRFHTHIEDIIAHCSGKKEREKTLTDYSHTELTAQALSSIEDLVKGL

SEQ ID NO: 63 - protein, 2565 aa, Bacillus velezensis
MTQATEIQDIYPLSYMQEGMLFHSLLDSGSNAYVEQISFTVSGDLCIDTFQKSLDMLISRYDIFRTIFIKEVPDLEGPQQVVLSRRDTAVQTENISDYSEERQQSIIKEFKETDRHKGFDLQKGPLMRLTLFQTGENRHTCVWTHHHIMMDGWSLGIVLKDFFSMYYAIRNGRPVNLGSPAPYSSYIKWLRSRNKEETSAFWSRCLEDYGEVVSVPQTKNKPAQNGYASEHFQFSLESETVQKLTDIARSTGVTLNTLFTSIWGLLLHRYNGTEDAVFGSVVSGRPSAIAGIESMAGLFINTVPVRVRAAGDMTFSSLLKKVQKESLAAEEHSYYPLYDIQNESGLQQDLLNHILVFENYPVQMQTAVNGWKQTESSALSLENFSMAEETNYDLNVVIVPGEEFYVKFSYNAGIYDREDMKRIKGHILEVISCVTEDPDRLLSSISLVPPEEEALIHSFNETNRPYPETTVHGLFEEQAAKTPDQEALRYNGVSWSYKKLNQRANQIAHALREKGACPDQITAVMLRRSMSTVAALLGIWKSGSAYMPIDAEFPPERISFLLRDSEASLLVTEKDLLPLIPPHFKGNVVIMEETVSQQTAPLPPVSDSGNWAYVIYTSGTTGRPKGVLVQHKAISNTLQWRREEYGMTEGDIALHLFSYVFDGSLTSLFTPLLSGACVLLTDEDDAKDVLSIKQKITRHGVSHLLIVPSLYRVLLDSLTKKDAQTLRAVTFAGEAATPDIVEASRGICPNAELLNEYGPTENSVATTILRNLQKSSRITIGRPIANTSVYMMHGDRLQPVGAVGELCISGKGLADGYFQQKELTGKVFTPHPFREGERLYRTGDAARFLPDGTIEYMGRFDDQVKVRGYRIELGEIETALRSLSGVKEAAVMVRKTADGEQELAAYVVLENAGVTFDPHAELAGRLPAYMIPGSFTKLTEMPLSVSGKLDRAALPEPKEAGRTGDYQAPRTMLETELLSIWQEVLKREHISMRDDFFQIGGQSLKAASLVSNIHKRLQIELAVRHVFEHPTIESMARFLEQRKRGEYAEITPAEAKDLYPLSFAQKRLYALHQLAADSTGYHMPACLELSGRLNRDRLHEAFSALLQRHEALRTSFVLRNGEPMQHIHAHVDLDLTEIHMPSGNLLQEVMETFVKPFDVEKAPLLRVTLAKVTEERHFLLLDMHHLIADGVSMSVLIQELTDLYRGKELRPLKLQYKDFSVWQHERFAAEEFKRHERYWLDAIGENIPVLDLPLDKKRPQLPDFSGSVVRTRLQKETAENLRRLMDETGSTLYMILLASYSLFLSKLGGQEDIVVGSPAAGRSRAELDGVIGMFVNTVAMRSRPKGDKTFRAYLEEVKMLALGAAEHQDFPFEELAQKLDTHREVNRNPLFDAMLVLQNSDDFEVNLPGLSVSSHAVKHDISKFDLTLHAEERPDGSLDFHFEYSTALFEKDTIERWAGHFKELLGQIAADYERKLSDIHLLGINERQMLLQAENQTAEYPRHETIVSLFEAQAEKMPDQIAAVMSHERLTYRELNEKADRIADMLSENGIRSGQIVGFMTERSPDMLIGILGILKAGGAYLPIDPDYPDERISFMLTDSGARVLLTQSGLGISGMDGLPVLYIDKPESVSADRTKEIITPEQPAYVIYTSGTTGKPKGVMTEHRNVISLITHKGLPFDFGSEDVWTLFHSYCFDFSVWEIFGALLYGGKVVIVPKDTARDPHLYRQLLQSEGVTVLNQTPTAFSGLIHEEAGHTDKLKLRYVIFGGEALQPGMLKSWKEKYPETELVNMYGITETTVHVTCKKLNMDDIERNKSNIGRPLETLHAFVMDAYMNPQPIGIPGELYIGGEGVARGYVNRDDLTASRFITNPHVSGMRLYRTGDIAKRLSNGELEYVGRKDAQVKVRGHRIELGEIKSALQELSSVKEAAVITRADQHGQHSIYAYAVLHGNEKIKEAEIQASLRAFLPEYMIPARLIALDELPLTANGKLDEKALPQPELNDSLGNDISLRNETEEMMADIWEELLGVEGLGPNAHFFHLGGDSIKALQVCARLKQQGYETTVRELFEHQTLGEVSMRLRKVRRVIDQAPVTGDVPLTPIQHWFLSQSLPHDHFNQSVMLRSADRINESAMRKALAQLAVHHDALRMVCGTQNGSVIQYNRAEKLSEEELFTFETLDVRGKGSLQEEHAAIEQAAACIQTSIRLETGPLVAVGLFHANDGDHLLLSIHHLVIDGVSWRILFEDLTACYRQVLEGKETALPAKTDSYQTYAKQISDYAKSRRLLQEADYWSERERAAVEPLPKDARISSNLLKDTDVMTVTLTKQETEQLLTEANRAYTTETGELLLAALSLALNRWTGNETFKISMEGHGREEHLEHLDISRTIGWFTSIYPVLVDASFQDQADDGERLGYHIKRTKDMMRRIPHKGAGYGVLKYISKLWEETESDSPEISFNYLGQFDREIRSSGFGVSPVKAGNEVSPDWERPYTLDISGSVSSECLSMHVVYNRFQYQKETIEVLTGYFHAFLKQIISHCTGKEEREWSAADFSDEELTLEDLSDIMGAVNKL

SEQ ID NO: 64 - protein, 727 aa, Bacillus velezensis
MGQQPEIQDIYPLSFMQEGMLFHSLLDHDSRAYFEQAVFTINGQLDRERFQKSIDAVFERFDIFRTTFIHKNVAKPRQVVLKNRPSRVQFHDISHLDEKAQDKYTDRFRKEDKDKGFDLQSDPLMRVSILKKAPERYVCIWSHHHIVMDGWCFGIVMKEFLMIYQSLGDGRLPSLEPVQPYGKYIKWLMKQDRKEAEIFWKTRLADLEQSASLPKKSAEPNGELEQAVFTISEEQTNELKNIAARAGATLNTVFQALWGMLLQRVSRCDDAVFGSVVSGRPSDLAGVEKMVGLFINTIPVRVKSGSFSFLELVRHLQQETLQAEAYSYYPLYDIQAQSPLKQALFDHIIVFENVPAQREIENVSQSGSFDFAVEDFTMEEVTNYGCSIKVIPGNSLYIRLNFDTGIYDSVFMKNIETFLRHMMNSVISDPEICASEIALLDAREARSMLDAFNRTETVEPPAPTLHGLFARRAALSPHRPALRFPGGMLTYAELDQYTDRLAVWLRQKGVRKESMVGVLAERSPEMVVSVLAVLKAGGAYVPLDPEYPEDRLLYMLDDCGACILLAQPGLSVSGFSGETLEVSLSSLTGETETGAVSEEADSDSLAYIIYTSGSTGTPKGVAVEHRQATAFLSGMQGQFPLTEEDIIVMKSSFSFDASIWQLFWWTMSGASVYLLPAGWEKDPVRMIEAFASEKVTTAHFIPAMVNSFLDALETEPAETRTRLGRTL

SEQ ID NO: 65 - protein, 1431 aa, Bacillus velezensis
SVPFQLDEAESADAFVRPFCLEEAPLFRAALVKESDERHLLLTDMHHIISDGVSVNTLIKEFGELYAGRSLAPMRLQYKDYAIWQRSFQEKEGYQKQEAYWLKRLEGELPVLELPADKPRPAVRSFAGGSVSCTLDAETASGLHRIARDHGSTLYMVLLAAYNTLLARLSGQEDIIVGSPIAGRPHKDLEPILGMFVNTLAIRTEPKGDKRFTDYLAEVRQAALEAYEHQDYPFEELVERLGVQRDTSRNPLFDAMLVVQNIEHEELLLDGLHIQNADVSRPVSKFDVTLQASEGGGQIHFLFEYAASLFRKETMQRWASHFMTMLEHIVREPETSLQAISMLTAPERNRILSDFNGMTDQQLPEKTVHELFITQARKTPDAAALISGETLITYKELDDWSNKIARALQKRQIGPDAAVGIVIPRSPEQVAAVFGVWKAGGAYVPIDPEYPEERKQYIISDSGTALLLTAHGAIEQVPDRFNGEVLALEDIQEQDASPVQSLSAPEDLAYIIYTSGTTGRPKGVMVEHRSVSQTLQWRSGFYDLNEKDTILQLFSFSFDGFVTSMFTPLISGAKAAVLAEDEARDILAIKHYLASYRITHMIIVPVLYRTLLDVLEPGDAESLRIVTLAGEAVDQNIISRSLSVCPHTELANEYGPTENSVATTAARHIEQSENITIGRPIEHSHVYILNGDHPQPIGVTGELCISGSGLARGYRNLPKQTARAFVQDPFQKNRRMYRTGDMAKWLPDGTLQYIGRMDEQVKIRGYRVELKEIESALTGIKGVKEAAVTALPASAGQTELCAYIVTEEGTESETVQQALRNEMPAYMVPAFFETLEALPVTPNGKLDRRALPEPRKKAHTGRAFTEPESDMEKELSAIWSEVLGTENIAADQSFFELGGDSIKALQVSARLHQAGKQIAVKDIFSRPTIRELAPYVRTERQPVSQAPAEGEVKWSPVHKWFFTQDMKEANHFNQSVMLTRANSIGEEALRKTLKAITVHHDALRLVCKKDEEKGLLLFNRPADLADEQLYSLTILEMEGDEHEKERFVKRRVAELQRNMDLENGPLVQAGLFRSEAEDYLFLTVHHLAVDGISWRILLEDLASAYEQAVSGQEIKLPPKTMSFKTYTEQLADYAESRQLLQQAEYWREIEHYETESLPYEQADLSQTPAKKRNTVSFTLTESETDALLKDVHSAYNTDTQDVLLASAVLAVQKWSPRHALKIALEGHGRQSEQAGADISRTVGWFTSIYPVLFRSGAYEPLEEYEIRTLKTVKDTLRRIPDKGNGYGVLKYLTPPKLAGMTFGKAPEISFNYLGQFDAPGGNPAETEQPDAFQFSPLGGGDDVTDTWKREQSLEISAIAAKGRMTVSISYETERFRQDTIERLSESCRYYLLKLSEHCLGKTGTEKTVSDFDDRELTEEALQDIADLLSFH

SEQ ID NO: 66 - protein, 1267 aa, Bacillus velezensis
MDKTKNIQNIYPLSRMQEGMLFHSFLQKEGAAYIEQSVFTIKGRLRPELFEQSVQSVIRRHDIFRTVFLPHVAQLNGPRQVVLREREFRLHREDLTHLDEAEQSAYLQRFKERDRLKGFDLQKDMLMRVSLFKTADEKYVCVWSHHHILMDGWCLGIVLQEFMHMYRAIESGSPVTLAPAKPYSTYITWLTDQDKDAASEYWKGYLAGCETPSGLPKISARPQEKGYRKEELLFSIDQNLTDKLKTIAKEEGATLAVLMQTVWGLMLQRYNRTDDAVFGAVVSGRPSVIDGVESMIGLFINTVPVRIKTGDESFRELLGRLQKEMLDSEAFSYHPLADIQSQTELKQDLIDHIIVFENYPIQQQMKDAEKESDAPFRIGNVNVSEQSGYDFNLIIAPGDELLIKFSYNANVYDEVWIESVKGHLEEALRGAAFNPDVPADRLPMLGQKEKSRIIGEFNDTKTTYERDESIISLFSRQVKKTPDHQALHAGGLTMTYRELDERSTAFARTLLENGLAPKGIAGILAERSPEFVIAVLAVLKAGGTYLPLDAELPTDRIADMLTESGAQLLTVQKGIETDIDFSHIISIPAAAEKQTPDAGKLNTDTAPDDLAYIMYTSGSTGKPKGVMISNRNVVSLVSNSNYTSAGMSDRLILTGSIGFDAVTFEIFGALLNGACLHVVDRSTMLAPERFGNYLSSNRITILFLTTALFNQFAQADPEMFSGLHTLYVGGEALSPALINKVRHRCPNLSLYNIYGPTENTTFSTFYEIRHDFSQPIPIGKPISNSTAYIIDKNGGLAPIGVPGELCVGGDGVAKGYLNRPDLTSEAFVSHPVHPEEKIYKTGDLAHWLPDGSIGYISRIDRQFKIRGKRIEPAEIEARLTEIDGIREAAVIVSDEGQEAILCAYYTGAHVEERAIRSLLARSLPDYMIPQYVMKLDRMPLTANGKVDRRGLPAPERKKTSSKAVPPRNWVERELIDIWTPILGCRELGIQDDFFELGGHSLKALQVIHQLKTRQQMDVPIEMIFEYPTIEQLAEKLYSNTLTEAAEQHISRLNQPKGRNLFCFPPISGFGIFFKDLAAALNERAAVYGFNFIEEDSRMEQYIDKMLEIQPEGPYILFGYSAGGNTAFEAAKAMEKRGLEISDVIIADAYRKLDTLPPQPTNATAENVPEAVREAVIRKTERYQTYWAELINDGQIAANLHFIEAGIKEEHSDKTEPMKWEGATTGLYQEYQGEGAHKDMFEPAFAQQNAEIILDIIANSGRRLARNL

SEQ ID NO: 67 - protein, 126 aa, Bacillus velezensis
MTNLSWLTYVMIILASYRLTHLIVFDKITEFIRKPFIKQEKTVDQNGRAVQKKVPSSAFGYMLQCYWCAGVWCAILIGICYLVWPRYAHPVIFILSIAGAQAILETCVGVGTKVIDVLAAMKHKKS

SEQ ID NO: 68 - protein, 512 aa, Bacillus velezensis
MKSCRFSMIWFLAVVLTAGIFTFSASAQASGTQPEREMRAVWIASVTNIDWPSKKGLSPEEQKREYSKLLDDVQEMGMNAVIVQIKPAADAFYPSDYGPWSEYLTGTQGKNPGYDPLAFLVEETHKRNLEFHAWFNPYRITMNHTNLNALSDDHPARSHPDWVAAYGKQLYYNPGIPEVRQFITDGIKEVVSRYDIDAVHMDDYFYPYKIAGQEFPDQAEYERYGKAHFASVDDWRRDNVNRLVKEINQTIKREKPYVKFGISPFGVWRNAADDPTGSETAAGVRNYDDLYADTREWIQKGYIDYIAPQIYWSIGFKAAAYDVLADWWGKEVNNRPVHLYIGQAAYKINNNADPAWADPGEYGRQITLNRGSAWIKGSMHFSLKDLNRNPLDVKNRLIKDMYSRPALIPEMPWLGHSALKKPAVKRAEKNASGHTLYIEDAKSNGKKTAYYAIYRAEKGKQPYLVDTVRKTSSRTQTFSDTDIRAKEACTYFVTSVDRLHHESRPSAKRTIK

SEQ ID NO: 69 - protein, 380 aa, Bacillus velezensis
MNFQLTKEQQMVREMVRDFAKNEIAPKAHEVDQSAVFPIDTFKKIGELGLLGIPFPEEYGGAGGDTISYAAAVEEIGKACGSTGLSYAAAVSLGASPLYYFGTDQQKQEHLIPLASGKALGSFGLTEPNAGSDAGGTQTKAEKKGDDYVINGEKCWITNANYARTVIVTAVTGKNSAGKPIISALIVPTDTPGFTITNPYDKMGVRGSDTAELVLEDVRVPADNLLGDPEKGFKQFLYTLDGGRISIAALAVGIAQGALEASLSYAKERKQFGSPISSFQAIQFKLADMAMEIDLARQMVLKAAWLKDQNLPFTKEAAFAKLYASEMAVRTCLQAIQIHGGSGYMKECGVERMLRDAKLMEIGEGTSEIQRMVIARQLLK

SEQ ID NO: 70 - protein, 546 aa, Bacillus velezensis
MAELIHLTAGKLLERTAELFPDREAVVYPERGLRYTYAEFDRLCRQTAKGLMKLGVEKGDHVAIWASNIPEWLAAQFATAKIGAVLVTINTNFQIAELDYLLAHSDVSALIIMDSYRQTSYVEMVNKLIPELKTCERGRLRSKRYPFLRTVLYIGDKSLPGMHRWDSLLDNAEAVTDAALDGRMDSLKKDDCIHMQYTSGTTGFPKGVMLSHFNIVNNAANIAECMKLTSCDRLCIPVPFFHCFGCVLGVLACVSAGAAMIPIEQFSPPAVLKTVEQEACTALHGVPTMFIALLNDSRFSEYDLSHVRTGIMAGSPCPAEVMREVIGKMGMTDITIAYGQTEASPVITQTRTDDPFERRVETAGRALPHIEVRIVRPGTSGEAARGEQGELCTRGYHVMKGYYKNQEATEEAIDKDGWLHTGDLAVMDEDGYCKITGRLKDMLIRGGENIYPREIEEMLYRHPAVADVQVVGVPDPKYGEEAAAWIRLKDGQTASAEDIRTFCKEHIARYKVPRYVLFTDEYPMTASGKIQKFKLREKTIEELKLT

SEQ ID NO: 71 - protein, 449 aa, Bacillus velezensis
MFKKVLIANRGEIALRIIRTCKRLGIPSAAVYSEADRDALHVKAADEAYPIGKSRVNESYLHIDRIIEAAKSAGADAIHPGYGLLSENSLFAERCRKEQITFIGPPGDIIAKMGSKIEARKTMQKAKVPIVPGVSEPLPDVHSALAEARAIGFPVMLKASAGGGGIGMQIVHSEEELAKAFEGNQKRAASFFGDGAMYMEKVIENARHIEIQILADSFGNTVHLFERDCSVQRRHQKVIEEAPSPFVDDELRQRLGETAVKAAKSIGYQNAGTIEFLVDQKKQIYFLEMNTRLQVEHPVTEEITGLDLVEEQLKIAAGQALPFSQKDINHRGHAIEVRIYAEDPVTFYPSPGTISSFSVLRHPSVRHECAVEKGSVISPFYDPMIAKMVVTANTRKQAIEQLKTALGEYHVEGIKTNIPLLTKIAHSEGFEKGEATTGFLQTMNEGASK

SEQ ID NO: 72 - protein, 70 aa, Bacillus velezensis
MSVIKIQMAGNLWKIHVKPGDVIEEGQEVAILESMKMEIPIIADAAGTVKEVKKSEGDFTDEGEVLIELQ

SEQ ID NO: 73 - protein, 299 aa, Bacillus velezensis
MNCPKHVRINEVGPRDGLQNESAWVDTEDKIEWINMLSKTGLPYIEVTSFVHPRWIPALRDSLDVAKGIARSEHTVYAALVPNLIGLEHAAEGGIDQACVFLSASETHNQKNVNKPIDRTVQELRRVITEAKAEKMATRAYLSTVFGCPYEQNVPVEQVIRLSDTLLEMGVDEISLGDTIGAANPLQVIAVLEALLPRIPASKIALHFHDTRGTALANIIPALDMGITSFDTSSGGLGGCPYAPGSAGNAATEDVIYMLEQMGIDTGTDMNKLLYAAGWIADKIGKDLPSRNLQAFRTK

SEQ ID NO: 74 - protein, 259 aa, Bacillus velezensis
MGDCVLYSVCQETIGLITLNRPHAANSLSSDMIDHLQRVIEDIKNSPSIRCVILTGTGNTFCAGADLKERAGMNHEQVKQSVRRIGETAASIEALPQPVIAALNGTAVGGGLELALACDIRIAVSRAGLGLPETGLAIIPGAGGTQRLPRLIGPGAAKELIYTGRRLSAEEGKDMKLIEHVCEAGELMEKAKALAGRIAANGPIAVRQAKSAINKGLETDLNTGLEIERKAYEQVIPTLDREEGLRAFKEKRPPEYKGK

SEQ ID NO: 75 - protein, 509 aa, Bacillus velezensis
MDYEKERQTRSKTIEKGGAAKYHASNEKKGKLFVRDRLKLLFDDGISVEDAFFAECMSDGLPADGVVTGIGTIGGRTVCVMANDSTVKAGSWGAKTVEKIIRIQETAEKLQCPLLYLVDSAGARITDQVDMFPGRRGAGRIFYNQVKLSGRIPQICLLFGPSAAGGAYIPAFCDIVIMVEGNASMYLGSPRMAEMVIGEKVSLEEMGGARMHCSVSGCGDLLARTEQEAIMMAQTYLSYFPANYTEKAPVNKSKNPKAFEKPLSDVIPAHQNAPFNMMDLIERVIDEDSFFEIKPLFAQELITGLARIHGQPVGIIANQPRVKGGVLFLDSADKAAKFIALCDAFHIPLLFLADIPGFMIGTKVEQAGIIRHGAKMISAMAEATVPKLSVIVRKAYGAGLYAMAGPAFEPDCCLALPTAQIAVMGPEAAVNAVYANKISELAPEERPAFIQEKRDEYKEDINLYRLASEMVIDGIVPADSLREELNKRLTAYMSKQLTFTHRKHPVYPV

SEQ ID NO: 76 - protein, 400 aa, Bacillus velezensis
MKKIPVTVLSGYLGAGKTTVLNHILQNRNGLKIAVIVNDMSEVNIDAGLVKQGGGLSRTDEKLVELSNGCICCTLREDLLVEVEKLAKDGRFDYIVIESTGISEPIPVAQTFSYIDEEMGIDLTTFCRLDTMVTVVDANRFWHDFQSGDSLLDRKEAVGEEDERVIADLLIDQIEFCDVLILNKCDMVGEKELEQLETVLRALQPRARLIRSVRGEVPAECILNTGLFEFEEASSSAGWIKELTAGHEAHTPETEEYGITSFVYSRRLPFHTARFDSWLHQSMPDSIVRAKGIVWCATRNSLALLMSQAGPAVSIEPVSYWVAAMPKLEQEQIKQQEPEILEDWDDQFGDRHTNLVFIGTDLDEAAITKELDQCLLTPSEFDSDWSQLEEPFQWDIQRAE

SEQ ID NO: 77 - protein, 378 aa, Bacillus velezensis
MKALTYQGKEHMEVKEVPAPAIQDERDVIVRITATGICGSDLHLYKNGIPADPGYIVGHEPMGIVEETGSQVKKLKKGDRVVIPFNIGCGECHYCKHQMESQCDESNPNPHTDAGGLFGFSEFNGNYPGGQAEYLRVPYADFSSFLVPADSELEDEQVLLLSDVMPTAFWSVQHSGVKKGDTVVILGSGPIGLMAQKFAWKKGANRVIAVDQVPHRLEHARRINGAETFNFSEHDEIGKLLHEQTSGGADVVIDCVGMDGTPLSKEKTEQKPNQFGTISPILTASEAVKKFGTVQLTGAYISEADGFPLGDFFTRNVSLKMGQAPVIHLMPMLYQMIEQNEIDPTDIITHKMSLAEAPAAYDIFDKKEDGNIKVILKP

SEQ ID NO: 78 - protein, 144 aa, Bacillus velezensis
MNIYRPAGFWIRLGAVVLDYLITSVPLAIIFMLATGKDPNESTMISIILTLYAILLPVYWNGYVIGKKICGIRIVKKDGTQVGFLTMILRVLVGGLIYGVTFGIGVIVSAFMVGMREDRRSIHDFVAGTYVTYALPDESIEKSE

SEQ ID NO: 79 - protein, 107 aa, Bacillus velezensis
MKKAALSLAAFFITAMVFTMPAHAAGTKMPSTMSLTEQQKKEIESLEKEVLEKRKHVISKYVEYGVLPKEKAEHIKQHMDRRFNMMKQNGFVPKPPPHKLEKRHHHS

SEQ ID NO: 80 - protein, 478 aa, Bacillus velezensis
MIHKKQGLFPDTFLWGSASAAYQVEGAWNKDGKGPSVWDLFTKIPGKTFKGSNGDTAVGHYERYKEDIALMAEMGLKAYRFSVSWPRIFPNGRGEINESGIAFYEDLIDELISNDIEPVLTLYHWDLPQALMDEYGGFESRKIIDDFNNYCIALYKRFAGKVKYWVTLNEQNYNFHNGFITATHPPGVKDRKRFYEANHIAFLANAKAIESFRQYVPGGMIGPSFAYSPAYPLTSHPEDITAFENAEEFMNHWWLDMYCRGTYPQIPFNYLKEKGWAPAIEAGDMELLAKGKPDFIGVNYYQTITYERNPLDGVSEGKMNTTGQKGTNQDTGIPGLFKTKKNPNLVTSNWDWTIDPIGLRIGLRRITSRYELPVFITENGLGEFDKIEEDGSIQDDYRIDYLRSHLEQCREAISDGVHLIGYCSWSFTDLLSWLNGYQKRYGFVYINRDEEDEKDLKRIRKKSFYWYQNVIETNGKSL

SEQ ID NO: 81 - protein, 132 aa, Bacillus velezensis
MNKSWKPQELAISYHQFTIFQKDSEPPVIDWTDEAIEKGYAEADGAVSFEARRNTRAFIVLRLNTSEPVPSYEKKATVPFEAVKDGIEIESVMSKRLFFHIPKGRYSLTCYSVPAEISDLHADTYIIDAAAM

SEQ ID NO: 82 - protein, 145 aa, Bacillus velezensis
MKTLKALLLVLIIIAGAVAALIKGDLFSDNEQTVQKSDYDKVILFPSDRYPETAKHIKDAIKEGHSSICTIDRDGVHKRREQSLKHVPVKTGYDRDEWPMAVCKQGGNNASVEYISPADNRGAGSWVGHQLTNDPDGTRVLFKIK

SEQ ID NO: 83 - protein, 185 aa, Bacillus velezensis
MKTTEYLHEILNEISRTAALISDSEADKLADQILSADQIFTSGAGRSGFMAKAFAMRMMHIGLNAYIVGETLTPPLQEGGLVIIGSGSGETKSLLHTAEKAKSLNGIITALTINPDSSLGKLADLTITIPGSPKEETGGDRKTIQPMGSLFEQTLLLFYDAVILKIMEKKELNSADMFTKHANLE

SEQ ID NO: 84 - protein, 211 aa, Bacillus velezensis
MELQLALDLVNIPEAIELVKEVEPYIDVVEIGTPVVINEGLKAVQEMKTAFPHLKVLADLKIMDAGGYEIMKAAEAGADIITVLGATDDSTIKGAVAEAKKQQKKILVDMINVKNLETRAKEIDQLGVDYICVHTGYDLQAEGKNSFEELTAIKKAVKSAKTAIAGGIKLDTLPEAIKQNPDLIIVGGGITGADNKADAAAKMKQLITQGS

SEQ ID NO: 85 - protein, 120 aa, Bacillus velezensis
MSRMDEKTFNCEKELTLAVIGGKWKMLIMWHLGKEGTKRFNELKALIPDITHKILVNQLRELEQDLIVHREVYPVVPPKVEYSLTAQGESLMPILDAMYKWGKDYMELINIDKTAIKESF

SEQ ID NO: 86 - protein, 3584 aa, Bacillus velezensis
MEITFYPLTNAQKRIWYTEKFYPNTSISNLAGFGKLISEDGVQAHYVEKAIQEFVRRYESMRIRLRLDDEGEPVQYVSEYRPLSIGHTDIRQAGCSADELSKWGREEAGKPLALYDQDLFRFSVHTISENEVWFYANVHHIISDGISMTILGNAITDIYLELSGGTSEEQTEIPSFIEHVLTEQEYVQSKRFKKDRDFWNGQFETVPELVSLKRSQADAGLDAKRFSQEIPHDLYGRIHSFCEEHKVSVLSLFQSALITYLYKVTGRDDVVTGTFMGNRTNAKEKQMLGMFVSTVPVRTSVDGGQSFLEFVKGRMKDLMKILRHQKYPYNLLVNDLRASKSSLSRLFTVALEYQVMQWQKKENLSFLTDPIFSGSGTNDISIHVKERWDTGKLTIDFDYRSDIFKGEEIESVSERLITLIEDAISSPDRIIDELTLLSESEKERLLKRASGNPVNYRGEMTIPGLFEEKVKSLSDKPAVVYEGRTLSYRTLHEQSGRIAGRLLQAGISADSPVAVLLGRSERVIAAILGILKAGGAYVPIDPDFPADRIQYILEDSGAKAVLTEAGIQAPAADAERIDFDEAVQYETAADGVSTQSDRLAYIIYTSGTTGRPKGVMIEHRQVHHLVQSLQQEIYQCGEQTLRMALLAPFHFDASVKQIFASLLLGQTLYIVPKTTVTNGSALLDYYRQNRIEATDGTPAHLQMMAAAGDVSGIELRHMLIGGEGLSAAVAEQLMTLFHQSGRTPRLTNVYGPTETCVDASVHQMSADNGMNQQAAYVPIGKPLGNARLYILDKHQRLQPDGTAGELYIAGDGVGRGYLNLPDLTAEKFLQDPFNGSGRMYRTGDMARWLPDGTIEYIGREDDQVKVRGYRIELGEIETVLRKAPGAAQAVVLARPDQQGSLDVCAYIVQEKGTEFHPAEYREYVSKHLPDYMVPAYFTKTDEIPLTPSGKADRKKLFALDVQAVSSSEYAAPRNETEETLAVIWQEVLGMDKAGIYDHFFESGGHSLKAMTLLTKIHKQMGVDIPLQYLFEHPTIAALADYAENRNEGPAFSAIEPAEKQASYPLSLAQQRTYIASQFEDAGVGYNMPAAAMIEGALDREKLERAFSALISRHEALRTSFQSEDGTPRQVIGEHVPFHIEMIEARGRTNEQVMKDFVRRFDLSEAPLFRIGLQTLGHNRHMLLFDMHHLISDGVSISIMLKELADIYGGNQLPELRIQYKDYAVWQAERAKEGYKKERAYWKEVFSGELPVLQLLPDYPRPQVQSFEGDRVSAKLPKMLRERLRKLAEKNGATLYMVLLSAYYTLLSKYSGQEDIIVGTPSAGRNHSDTEGLIGMFVNTLALRSSVKQDQTFAGLLGHVRKQVLDAFSHQDYPFEWLTEELNVPRDMSRHPIFDTMFSLQNASDGIAEIGNLTLSLHETNFNIAKFDLTMQARETAEGIALDLDYCTKLFKRSTADRMLAHYVRLLESAAAQPDAKISEYDLLSEREALNQLQRFNPERTVYPKDQTIVQIFEEQVRKNPDRTALQFEGETLSYQQLNERANMLARHILSVGGGGKTAAVLCERSMDMIVSIMAVLKAGSAYVPIDPEHPVQRIQHFFRDSGANVLLTQQSLKPLAEKAGFQGVIVLADDEASYEKDSHNPALPFDSKTIANLTYTSGTTGTPKGNIVTHANILRTVKNTNYLTVSEEDTVLGLSNYVFDAFMFDMFGSLLNGAKLVIVPKDTVLDMSRLSRVIKRENVSILMITTALFHLLVDMEPSCLTTLRKIMFGGERASVEHVKKALAAVGKGRLLHMYGPSESTVFATYHPVDVIEEDTLSVPIGKPVSNTEVFIMNSAGRIQPAGIAGELCVSGEGLVEGYYNRPELTEEKFVKHPFKEGERMYKTGDLARWLPNGDIEFIGRIDHQVKIRGQRIELGEIEHQLQSHDQIQECIVLAVDQGAGDKLLCAYVVGLREISSRELREHSAKDLPAYMIPSVFIQLDELPLTGNGKIDRRALPMPDVTAANAVSYTAPRNETEQKLADIWAEVLQMERVGVHDQFFEIGGHSLAGMKLLALIQKTFGVQLTLKDLFTSPTAAGLAQLIEGAERKAAESIAPAAERETYPVSSPQKRMFVLQQLEGAETSYNMPSVLRLKGKLDAEKLKSVMKQLTERHEAFRTTFDIQDGETVQRIWTEADINMEYYEASEEDAERIIQSFIRPFRLDQLPLVRTGLVKLAEHDHLLLFDMHHIISDGASVGVLIDELSRLYGGETLEPLRIHYKDYAVWQQKFIQSEQYRKQEEHWLRELDGELPVLTLPADYSRPAVQTFEGDKLVFSLTEEQTSALRSLAKQTDSTMYMVLLASYSAFLSKLSGQHDIIVGSPVAGRSHADLANVIGVFVNTLALRTYPEADKTFTDYLKEVKQTALHAFDAQDYPLEDLLQKVEVQRDTSRNPLFDAVFSMQNANAEDLVMEGIELKHHPFNRKTAKFDLTMTAEDTDEGLTFVLEYNTALFKPETAETWKHYWLQLLEAAAENPAAKLSELSLVNKTEKQALLDAWKGKTISVPRDKTVHRLFEETAARYANRPAAAYNGAKWTYGELNARANRIARILMDCGVTADERVGILTKPSLEMAAGVLGVLKAGAAFVPIDPDYPEERISYILQDSGAKLLLTQEALGVPDSYNGETILLDGSRSILSLPLDENDEANPQTETTADHLAYMIYTSGTTGQPKGVMVEHHALVNLCFWHHDAFAMTADDKSAKYAGFGFDASIWEMFPTWTIGAELHVIDEAIRLDITRLNHYFEEHGVTITFLPTQLAEQFMELENTSLRMLLVGGDKLKRAVKQPYTIINNYGPTENTVVATSGVINPEEGSLSIGRAIANTRVYILGDGDQVQPEGIAGELCVAGRGLARGYLNREEETAKRFTADPFVPGERMYRTGDLVKWNAQCGIEYIGRIDQQVKVRGYRIELSEIEVRLAQLADVHDAAVTAVEDKAGNTALCAYVAPQQDDIEALKAALKDKLPDYMVPAFWVEMDELPVTANGKIDKKALPAPDIEAGSAVYKAPETEMETLLSDIWQEVLGLDQIGVSDNFFTLGGDSIKGIQMASRLNQHGYKLEMKDLFQHPTIEELVSYVERTEGKQADQGPVEGEAALTPIQRWFFERNFTDKHHWNQSVMLHAKDGFDPDLVEKTLQALIEHHDALRMIYREQKPYYRGLEDVSVELNVFELNGPAEDHEDRIEREADRLQSSISLETGHLLKAGLFRAEDGDHLLLAIHHLVVDGVSWRILLEDFTSVYTQLKQGNEPALPPKTHSFAEFAERIKEYANTKAFLKEADYWRELEEKEVCTQLPKDRQSGDQRMRHTRTVSFSLTPEQTEQLTTNVHEAYHTEMNDILLTALGLALKEWTGEDTIGVHLEGHGREDILDGLNITRTVGWFTSMYPMILEMKHADDLSYQLKQMKEDIRHIPNKGVGYGILRYVTAPEHKENLSFEIDPDISFNYLGQFNEMSDSGLFTRSGMPSGQSLSPDTEKPNALDIVGFIENGQMTMTFAYHSLEFHEKTIQSFSDSFKGHLLKIIDHCLAQDGPELTPSDLGDDDLTLDELDKLMEIL

SEQ ID NO: 87 - protein, 2749 aa, Bacillus velezensis
MSKKSIQKVYALTPMQEGMLYHALLDPHSSSYFTQLELRIHGSFQLELFEKSVNELIRTYDILRTVFVHQQLQKPRQVVLAERKTKVHYEDISQLDEARQTEYIERYKRGVQQQGFHLAKDILFKAAVFRLSEKELYLVWSNHHIVMDGWSMGVLMKSLFQNYEALRAGRPAGGSQGKPYSDYIKWLGGRDYEEAEQYWSSRLADFEQPSLLPGRLASEKKDYQNEEYSFVWDEELVAQIQQTANRHQVTGPNLFQAVWGAVLSKYNYTDDVVFGTVVSGRPSEINGIETMAGLFINTIPVRIKIDKDAAFSDVMAAVQKNAVEAERYDYVPLYDIQKRSALDGSLLNHLVAFENYPLDKELENGGMEERLGFSIKVEHAFEQTSFDFNLIVYPGKTWTVKIKYNGAAFAHDAIERTAHHLTRMMKAAVGTPDAPVRELGLVSGEEERQIVEIFNDTKTALPEEEAVHRLFETQANRTPASIAIKEAGREWTYREVNEAANRLARHLVKSGLEKGRTAAIMNDRSAETVVGMLAVLKAGGAYVPIDPAFPEDRLRFMAEDSSIRLVLTVQGYQEQAGALQVPVVMLDESADETVSGTDLNLPAGGNDLAYIMYTSGSTGKPKGVMIEHRNIIRLVKHSNYVPVHEEDRMAQTGAVSFDAGTFEVFGALLNGASLHPVKKETLLDAGQFAQFLKEQRITTMWLTSPLFNQLAQKDAGMFNTLRHLIIGGDALVPHIVSKVRKASPELSLWNGYGPTENTTFSTSFLIDQDYDGSVPIGKPIGNSTAYIMDENRNLQPIGAPGELCVGGSGVARGYVNLSELTEKQFVRDPFRPDEMIYRTGDLAKWLPDGTIEFLGRIDNQVKVRGFRIELGEIEAKISQAENVTESAAVIRKNKADENEICAYFTADQALSPEDLRKTLSESLPEYMIPAHFIQMNQFPLTANGKIDKKALPEPQAEAVQKEYVAPKTEAEQKLADIWEGILGVKAGVTDNFFTIGGHSLKAMMMTAKIQEHFQKEVPIKVLFEKPTIQELAHYLQHESEEEQQFEPIRQAPYQKHYPVSSAQRRMYILNQLGQASTSYNVPAVLLLEGSVDKNRLEEAMQALINRHETLRTSFDMAGGEVVQTIHKNVSFELETAEGREEDAEELTKAFIRPFALNRAPLVRSKLIRLEEDRHLLLIDMHHIITDGSSMGIFIGDLAKLYQGTELALPRIHYKDFSVWQREKANFDQHEAYWLDTFKGDLPVLDLPLDFPRPAERSFEGERIIFGLDKQVTAQIKKLLADTDTTMYMFLLAAFQVLLSKYSGQEDIIVGSPTAGRQHPDLQDVPGMFVNTVALRSHPAGKKTFKQFLDEVKTASLQAFEHQSYPLEELIEKLPLTRDTSRSPLFSVLFNMQNMEIPALRLGDLEISSYSMHHHVAKFDLSLEAAERGEEVGLSFDYAKALFADETIRRWSAHFVNLIKACAENPDIQLADASLLSAPEREALLSDEKRTEADLPEGTFVSLFERQAQKTPDLTAVAGGISLTYRELDERSNRFARHLQACGTGSEDIVAIMMDRSADLITAILGVMKAGAAFLPIDPETPEERIRYSLEDSGTKLLVVNERNMTAAAVYKGKTVVMEDGEWQNESADRLETEPGADQLAYIIYTSGTTGKPKGVQLEHRNLINYVTWFSREAGLTEADKSVLLSSYAFDLGYTAIFPILQAGGELHIVPKETYTAPDQLGEYIQKNGITYMKLTPSLFHMIVNTARFTSERRFSPLRLVVLGGEKIITSDVRKFHDVYAHTDFINHYGPTETTIGAIAERINMERLDQYEQRPVIGRPIANTGALVLDGAMQLVPPGASGELYITGKGLARGYLHRPQLTAEKFLSNPFSPDSLMYKTGDVVRRLPDGTIEFIGRADDQVKIRGYRIELKEVETVLLSVNGIQEAAVLAVSEGGLPELCAYYKADSELKGSELRKRLSETLPSHMLPAYFIQVDRIPLTANGKTDKNALPKPGVSQTAQTASVLPETELEEKLCRIWKQTLGTDTLGIDDNFFDYGGHSLKGMMLLANIQAELDKTVPLKALFEQPTVRLLAAYIEKSAVSEGYRMISPADSADAYPLSSAQKRMYVLNQLDRETISYNMPSVLLMEGEVNISRLQEALNQMINRHESLRTSFIDQNGRPMQQIAEQADIDLHIFEAADEEKADLIIQAFIKPFDLSAAPLIRAALVRLNEKKHLLLLDMHHIIADGVSRSMLVKELAHLYKGGSLPSPNLHYKDFAVWQNEPEQAERMKDHERYWLSAFSGELPELNLPTDFPRPPVQSFKGQSVRFRAGRETEKAVRELMESSGATLHMVLHAAFHVFLSKITGQRDIIIGSVTAGRTSAEVQEMPGMFVNTLALRNETRKEQTFAGLLERVKQTNLDALAHQDYPFEDLIGKLDLPRDMSRNPLFQVMVTTEDPDKETLELENLRITPYESNQGTAKFDLTLGGFTDQEGLGLQFEYATDLFKKETIEKWSAGFLRILKQAAESPDRKLPEISLISDAEKQALLDAWKGKTLSVPRDKTVHRLFEDTAARYANRPAAAYNGAKWTYGELNARANRIARILMDCGVTADERVGILTKPSLEMAAGVLGVLKAGAAFVPIDPDYPEERISYILQDSGAKLLLTQEALGVPESYNGETILLDGSRSILSLPLDENDEANPQTETTADHLAYMIYTSGTTGQPKGVMVEHHALVNLCFWHHDAFAMTADDKSAKYAGFGFDASIWEMFP

SEQ ID NO: 88 - protein, 822 aa, Bacillus velezensis
RLDITRLNHYFEEHGVTITFLPTQLAEQFMELENTSLRMLLVGGDKLKRAVKQPYTIINNYGPTENTVVATSGVINPEEGSLSIGRAIANTRVYILGDGDQVQPEGIAGELCVACRGLARGYLNREEETAKRFTADPFVPGERMYRTGDLVKWNAQCGIEYIGRIDQQVKVRGYRIELSEIEVRLAQLADVHDAAVTAVEDKAGNTALCAYVAPQQDDIEALKSALKDTLPDYMVPAFWVEMDELPVTANGKIDKKVLPEPDIEAGSAAYKAPETEMETLLSDIWQEVLGLDQIGVSDNFFTLGGDSIKGIQMASRLNQHGYKLEMKDLFQHPTIEELVSYVERTEGKQADQGPVEGEAALTPIQRWFFEKNFTDKHHWNQSVMLHAKDGFDPDLVEKTLQALIEHHDALRMVYREEREGIIQTYLPVTECKASFEIVDLYGTDEDMLKSQIQRLADHLQGSLDLENGPLLKAEQYRTEQGDHLLIAVHHLVVDGVSWRILLEDFASGYKQAQQQNSIVLPQKTHSFKDWAEALNTFAQSEELKKQAAYWAQADAEELRPLPKDHDPNKRLVKHTAAVKCELTEEETAQLLTDVHHPYGTEINDILLSALGLTIGEWTENGKVGINLEGHGREEIIPNVNISRTVGWFTAQYPLILQISKEDGISSVIKTVKETVRRVPDKGVGYGILRYLSSDETEKGAAPEISFNYLGQFDNEVKTEWFEPSPYDMGRQVSEESEALYALSFSGMVTGGRFVISCSYNQEEYERSTVETQMQRFKDNLLMIIRHCTAKEEKEFTPSDFSAQDLEMDEMGDIFDMLEENLT

SEQ ID NO: 89 - protein, 1278 aa, Bacillus velezensis
MSQFSKDQVQDMYYLSPMQEGMLFHTLLNPGQSFYIEQMTMKVKGSLNIKCLEESMNVIMDRYDVFRTVFIHEKVKRPVQVVLKKRQFQIEEIDLTHVTDSEQTAKINEYKEQDKIKGFDLTRDIPMRAAIFKKSEESFEWVWSYHHIILDGWCFGIVVQDLFKVYNALREQKPYSLPPVKPYKDYIKWLEKQDKQASLHYWRGYLEDFEGQTTFAEQRKKQKDGYEPKELLFSLPEAETKAFTELAKSQHTTLSTALQAVWSVLISRYQQSGDLIFGTVVSGRPAEIKGVEHMVGLFINAVPRRVKLSEDTTFNGLLKQLQEQSLQSEPHQYVPLYDIQSQADQPKLIDHIIVFENYPLQDAKNEENSENGFDMEDVHVFEKSNYDLNLMASPGDEMLIKLAYNGNVFDEAFILRLKSQLLTAIQQLIQKPDQPVNTIRLVDEKERELLLTGLNPPAQTHQARPLTDWFKEAVNVNPDAPALTYSGQTLSYRELDEEANRLARRLQKQGAGKDTVVALYTKRSLELVIGILGVLKAGAAYLPVDPKLPEDRISYMLADSAAACLLTHQEMKEKAAQLPYTGTTLIIDDRARFEEQASDPAAAIDPDDPAYIMYTSGTTGKPKGNITTHANIQGLVKHVDYMAFSEKDTFLSVSNYAFDAFTFDFYASILNAARLIIADEHTLLDTERLTDLIRQENVNVMFATTALFNLLTDAGEEWLKGLRCVLFGGERASVPHVRKALEIMGPGKLINCYGPTEGTVFATAHVVHDIPDSISSLPIGKPISNASVYILNGQNQLQPFGAVGELCISGMGVSKGYLNRHDLTKQTFIPNPFKPGEMLYRTGDLARWLPDGTIEYAGRIDDQVKIRGHRIELEEIEKQLQEYPGVKDAVVVADRHESGDASINAYLVNRTPLSAEDVKRHLKKQLPAYMVPQTFTFLEELPLTTNGKVNKRQLPKPDQAQAAKEWIGPRNATEETIAHIWSDILGRQQIGIHDDFFALGGHSLKAMTAASRIKKELGTDIPVQLLFEATTIADIAGYLLHGEEKGMKDLTIMNKNQSDTLFAFPPVLGYGLMYQPLAKQLSGYKICAFDFIEEDNRIERYTELINQLQPEGPVKLFGYSAGCTLAFETAKRLEAEGRKVERLIMVDSYKKQGVSDLEGRTVESDVQALMKVNRDNEALNNEAVKEGLAKKTNAFYSYFVHTVSTGRVKADIDLLTSEPDFAMPPWLASWEEATTGEYRVKKGCGTHAEMLQGECLERNAAYLLEFLRKEHLKLTTSR

SEQ ID NO: 90 - protein, 243 aa, Bacillus velezensis
MVQLFKSFDTTEKTQLICFPFAGGYSASFRPLHTYLQGECEMLAAEPPGHGTNQMSAVEDFEQLVSLYKQELNLHPDRPFVLFGHSMGGMVAFRLAQKLEREGIYPQAVIISAIQPPHVERKKVSHLDDEKFLAHIIELGGMPQELVENKEVMSFFLPSFRSDYRALESFRPSDSHIIQSPVHIFNGRKDKKCIKDADGWKKWADNPVFHEFSDGHMFILSETEKVAERIYEIINRSTAGQLL

SEQ ID NO: 91 - protein, 436 aa, Bacillus velezensis
MNDAAKELNRTLSEENPHVLHMLSDLGRELFYPKGVLTQSAEAKAKAGKYNATIGIATSQGESMHFSHIQETLSAYNPDDIYDYAPPQGKEPLRQEWLKKMRLENPSLAGKDISTPIVTNALTHGLSIAADLFVNEGDTLLLPDKYWGNYNFIFGVRRKASIETYPLFQQDGRFNAAGLSELLKKQEEKAIVVLNFPNNPTGYTPGEEEASEIVSVILEAAEAGKEIVVLVDDAYYNLFYDETAIQESIFSKLAQVHDRVLCVKIDGATKENYAWGFRVGFITYSTKSEKALRVLEEKTKGIIRGTISSAPHPSQTFMLRAMQSPEYEKEKSLKYNIMKKRADKVKAVLAENKHYEDVWTPYPFNSGYFMCVRLKDINAGELRVSLLEKRGIGTISINETDLRIAFSCVEEEHIADLFEEIYQEAKQLQKQAEISG

SEQ ID NO: 92 - protein, 179 aa, Bacillus velezensis
MINTRNENIYLAGCLTFADVRKHFAYHQGKSAAVCFLIMLLASAICFEMNGPVTGGTWGVRALLNFLAAVILSLAVTVIATAISFFRLYRTYKTNQRLKSARSITIHQLGISQKQKNASILFEWDELLSAREHKDMFRLQTSGYGTLLLPKRLFYSQKDIAVFRQMLRENVNGKVNVTE

SEQ ID NO: 93 - protein, 320 aa, Bacillus velezensis
MINQNRLAAAYLAAILNALIIGFSFIFVKIALQSANPFDILAHRFTAAFICAMLPVLFGWIKLSVSWKNVLAILPLALLYPALFFSFQAFGLLYSSSSEAGIIQAAIPIFTMLFSSYFLKERPTWAQKGFTCLSVAGVVFIFTMKGVSAESASFKGAFLILLSALSSALYNTAARRMTQRFSLGELTWCMSAIGFASFNCIALFRHGAEGTIGQYFLPFRDPGFIAAILYLGILSSLITSLMSNYALSKIEAFKMSAFNNLSVIVTMLAGVLVLHESLRWYHIAGAVCIVIGVLGSNASGRRKKSILRHREKMKGNEDGI

SEQ ID NO: 94 - protein, 436 aa, Bacillus velezensis
MEKYMNVMIEVESLIEGGTFQEGARLPSIRQLAERFHVSKSTVIRALQELEKRHIIYAVPKSGYYLIKNEKKQEREQTGIIDFAASAPDPDIFPYRDFQHCINKAIDMYKNDLFIYGTPQGLPSLIRVLQTLLSDYQVFAKERNIFITSGVQQALSLLSLMPFPNGKKKILIEQPGYHLMVEQLEALRLPACGIKRTAEGLDMAEVERLFQTEEIKFFYTMPRFHNPLGSSLTEWQKRELVRLAEVYDVYLVEDDFLGDLEDNQKADPLYAYDLSSRVIYLKSFSKMIFPGLRVGAAVLPDSLAPVFHTYKKLSDIDCSMISQAALEVYIKSGMFKRHKEKIRASYRARSELLQNALQEYGGFSVKQTSIHTHLVLEKSLSASRVVQRLKAQGVLVEPIESHYLSDFPKENIIKLNVSNVKTGDITRGIKMLTDCL

SEQ ID NO: 95 - protein, 224 aa, Bacillus velezensis
MKIYGVYMDRPLSAGEEDRMMAAVSAEKREKCRRFYHKEDAHRTLIGDMLIRTAAAKAYGLDPAGISFGVQEYGKPYIPALPDMHFNISHSGRWIVCAVDSKPIGIDIEKMKTGTIDIAKRFFSPTEYSDLQAKHPDQQTDYFYHLWSMKESFIKQAGKGLSLPLDSFSVRLKDDGHVSIELPDGHEPCFIRTYEADEDYKLAVCAAHPDFCDGIEMKTYEELL

SEQ ID NO: 96 - protein, 215 aa, Bacillus velezensis
MKEGTSLKREFLMRWTFYFAGLLILSFGVSLTIKGKALGISPWDAFHYGLFQHFGLSVGQWSIVVGAVIVALTCLFTRTLPKIGAILNMVLMGMFIDFFSFLLPETHAFSLAAVFFSIGLLLIGCGVGIYVSAGLGAGPRDSLMMLISEKTGWNVQWVRNGIELTILAAAWMMGGPIGAGTIITAVLTGLILRFSLPQSSKLLTYAISGRATSVH

SEQ ID NO: 97 - protein, 247 aa, Bacillus velezensis
MLSVKGLNKSFGQNEILKKIDMEIEKGKVIAVLGPSGSGKTTLLRCLNALEIPNRGELAFSDFSIDFSKKVKQADILRLRRKSGMVFQAYHLFPHRTALENVMEGPVQVQKRDKEQVRKEAMELLEKVGLKDKMDLYPFQLSGGQQQRVGIARALAIQPELMLFDEPTSALDPELVGEVLKVIKDLANEGWTMVVVTHEIKFAQEVADEVIFIDGGVIVEQGPPAHIFSAPKEERTQRFLNRILNPL

SEQ ID NO: 98 - protein, 234 aa, Bacillus velezensis
MFLSNMPEPVIATAIPWDLVQQSFWPILSGGIYYSIPLTILSFIFGMIIALITALARMSNMKPLRWVFSVYVSAVRGTPLLVQLFIIFYLFPTFNITLDPFPSAVIAFSLNVGAYASEIIRASISSVPKGQWEAGYTIGMTYRKTLFRVILPQAFRVSIPPLSNTFISLIKDTSLASQILVAELFRKAQEIGAQNLDQILVIYIEAAFIYWIICFLLSIVQHVIERRLDRYVAK

SEQ ID NO: 99 - protein, 496 aa, Bacillus velezensis
MFYASDQLRHPETLVIGLFQKSTLNGFTKELDDKLDGHLTQLLKDGDVSAKRNRVSKVYPPAATGMKRIYFIGLGREADYSFEDTKECFARVFQQIHQDKKQEVSVLLDTFVSGEVPAADAAHALSESCLLAVYEVQDYKHKSNEPDQELKSVCAVTEEDLREVQAGLNVGAAYGQGTNSARTLVNMPGNMLTATDLASYAAELAAKYDFECEILEKDEMEELGMGGLLAVNKGSSEPPKMIVLKYQGKDQWEDVIGLVGKGITFDTGGYSIKPKTGIVGMKSDMGGAASVLGAMEIIGELRPEQNVLAVIPSTDNMISSDAMKPDDVIVSLSGKTIEILNTDAEGRLVLADGITYAKQHGASVLVDVATLTGGVIVALGNEMTGAMTNHAAFYEQVAESAKESGEPIWQLPITEKDKKRVRNSQMADLNNSPGREGHAIMAGAFIGEFAENTPWVHLDIAGTATANKATCFGPAGATGVMARTLAVLTERFTPER

SEQ ID NO: 100 - protein, 442 aa, Bacillus velezensis
MNAVVIAVLLMLVLSLLRVNIIIALMIGALAGGLTGGLGLGETVKAFTDGLGGNATVAVSYALLGAFAAALTKTGLPDAMVEASVKLIGKKEDSRKKALSKVLIVLIILIISCFSQNVVPVHIAFIPVLIPPLLKIFNELEIDRRLIACVMTFGLTAPYIVLPVGFGQIFQGMLRDNMAAAGLKVPLSDIPYALIIPTAGMVVGLILAVIVFRKPKKYETKEIAGLSSSPYTKKSIAIALISIAVSLAVQLYLSQVLGVEGMIMGALAGLFTLFISGVMKRNEADKLITDGMILMAFIGFVMLVAAGFSNVLNKTGDVASLVKASTGFIGHSQSLGALLMLVVGLLITMGIGSSFATVPVITTIFVPLCAQLGFSPMATIAVIGAAAAVGDAGSPASDSTLGPTSGLSADGQHHHIWDTCVPTFIFYNIPLVIFGWIAALVL

SEQ ID NO: 101 - protein, 197 aa, Bacillus velezensis
MKQRNLRAGDMALIGMFAALMAVGANITSMAPFLQVAGIPLSLQPFFCLLAAMLLGARRAAIAMTVYALAGLAGAPVFAQFSAGFAPFIGKSGGFILAYIPAAFAAGWLLEKTKKPGRLHYAWASLIGTAVIYIIGTTYTYIALKLWLHAPISYGMAWFYMIWFFIKDIVLALLLASIAPAVYRSIHKATGFSRNPA

SEQ ID NO: 102 - protein, 198 aa, Bacillus velezensis
MFFGKTKQTKQSERIPPNQNVTTKFPVLHAGNVPYYEDMSKWNLQVYGLVDRPMLLSFEDIKAFPEAEVKNDIHCVTGWSRLDNIWQGIRAKDIAEKAGVHKEAGFVILHAEEGWTANLPLSDFARETSLLAYAHNGEPLTPEHGYPLRGVFPHLYFWKSAKWLRGIQFTKENHPGFWEKNGYHMRGDPWKNERFTWD

SEQ ID NO: 103 - protein, 289 aa, Bacillus velezensis
MDGKQIKRGFAPAGRYAVPGTEVREMRSKGGRMYRIFVSFPQEEPPASGFPVIYLLDANSVFGTMAEALRVQSRRPEKTGVVPAVIVGIGYPTDQPFSAERHSDFTMPLSESELPVHPRGAAWPEQGGAEAFLSFIEEEVKPAMERDYPIDRGRQTIFGHSLGGLFVLQVLLMRPDMFQTYVAGSPSIHWNKRFIQEKAERLSDRLSAENLQVSVLLAAGEIEKTHKSRIPQHAEALYSLLSGFEDDGVRAEYSEFEGEGHISVLPVLISRALRFCLNPGGPHTPYSPA

SEQ ID NO: 104 - protein, 261 aa, Bacillus velezensis
MDALGMKGKTAVVTGAAQGIGEATALALAEQGVNVAAIDTNQDLLLGLTDRLRKKGVQAQGFAADVSDSAAVNDIIAAVERDMGPIEILANVAGVLRPGPVQSLSDEDWDQTFSVNTTGVFHVSRAVSRYMIERQKGAIVTVGSNAAGVPRASMAAYAASKAAAVMFTKCLGLELAAHHIRCNIVSPGSTETDMQRALWQDGNGARDVIRGSLDTYKTGIPLQKLAKPSDIANAVLFLASEQANHITMHDLCVDGGATLGV

SEQ ID NO: 105 - protein, 398 aa, Bacillus velezensis
MTNQHLLAEVSAKEVLDAYKPGAFFLASPKSTMLAEGMFAEVPDTDAENQLDSLPERVRQTLLEAKQAGIKHPIAAGAIPFDGRKASRLFVPKNVHTAGPLSFAESSAEKPQSNTYDIRPVPEPEGFMSGVEQGVFSITDGPLSKIVLSRTLHLTAEKDIDIPQAVKHLAQHNPRGYTFAADVTGTSETRKTLFGASPELLLSKNGTSILSNPLAGSRPRSTDPAEDQRRAEELLQSAKDLHEHAVVVAAVAAALKPFCRVLDVPEKPSLIKTEAMWHLSTEVKGELRDPSTTSLELAIALHPTPAVCGTPTDAAREAIQDIEPFDRNFYTGMAGWCDAEGDGEWIIALRCAEAETRSLRLFAGAGIVAGSKPQDELDETSAKFRTMLRAMGLYQDEL

SEQ ID NO: 106 - protein, 541 aa, Bacillus velezensis
MLTGFTPWPEEWADKYRKDGCWKGETFGGMLKERAALYGNQTAVTCKDVHWTYKELDERADRLAAGLHKLGIQKEDRVVVQLPNIAEFFEVIFALFRLGALPVFALPSHRSSEITYFCEFAEAKAYIIPDMHSGFDYRALARQVKDKLPDLAHVIVAGEAEEFQELSSLHREPVQLEDISPAEVAFLQLSGGSTGLSKLIPRTHDDYIYSLRISAEICGLDHHSVYLAALPTAHNYPLSSPGVLGTLYAGGRVVLSPTPSPDDCFPLIEKERVTITALVPPLAMVWMDASGSRSDDLSSLQVLQVGGAKFSAEAARRVKSAFGCTLQQVFGMAEGLVNYTRLDDPEEIIVNTQGRPMSPFDEVRVLDDDGRDVAPGEAGHLFTRGPYTIRGYYKAPEHNERSFTADGFYQTGDIVKLTADGYIIVEGRAKDQINRGGEKIAAEEVENHLLAHPAVHDAAMVSMPDDFLGERSCVFVIPKGEAPKPGELKAFLRERGLAAYKIPDRIEFIASFPKTGVGKVSKKDLRETIAQKVKPAEIKQS

SEQ ID NO: 107 - protein, 308 aa, Bacillus velezensis
MAIPSIPAYALPTASDMPENKVSWTLNPKRAVLLIHDMQNYFVDAFAKGEAPITEASQNIKKIKEQCKALGIPVVYTAQPGSQDPADRALLTDFWGPGLKSGPYEEKVIPELAPDDQDIVLTKWRYSAFKRTNLLDIMRESGRDQLMITGIYAHIGCLVTACEAFMDDIQSFFIGDAVADFSSEKHKMAIEYASQRCAYTALTNEVLELLGGAPVSEGEGKASAVLTKDRVREQIAAILQESPSDIPDHEDLLDRGLDSVRIMSLVEQWRRDGAEVTFVELAENPTLEEWWRLLSSRSQKVLPNADYL

SEQ ID NO: 108 - protein, 2375 aa, Bacillus velezensis
MHDTQQLPLTGAQAGIWFAQQLDPDNPIYNTGEYVEINGAIDVNIFKTALERVLTEAASLHARFEEGADGPKQIINPPFEAAIDVIDVSSEADPKQAALRLMQTDLAEPVDMAAGPLFRDILFRAGPERFFWYQRIHHIAIDGYGFSLLARRTAQMYTAIREGRPDNGRSFGSLDDLVKEDQEYRASDQFLKDREFWMEKFADEPDVVSLAERAPRTSTRFRRSTAYLSETALQHVKAIPNWHEAVTAAAAVYVHRMTNAGDIVLGLPMMGRIGSISLNIPSMVMNLLPLRLSLRPDMNFHEAVSQVAKEIRNIRRHQKYRHEDMRRDLKLLGDNRRLFGPQVNVMPFDYALDFAGARGTVHNLSAGPVDDLSINVYDRADGSGMRVDFDANPEVYSAEDIENHQKRFLLLLESAVKDQTQKIGTLNLLLESERLRVLESWNDTRKAEKQKSLPELFYEQAVKTPDRPAIITENEELSYAELNKRANQLAGMLKEKGLGPEQFAALLLPRSQELAVGMLAVLKTGAAYLPLDPDFPSERITYMLKDAQPACLITTMELSGRMPEDSDAKRIILDDPDTVKTVAAQNADCPAQAECSPLHPAYIIYTSGSTGKPKGVVVTLKSVSNFLLSMREMFTLGEQDRLLAVTTAAFDISGLELFLPLISGAGCVIARKETIQEPRALAHMIHSYGISIMQATPTLWHSLVTNEPDSLRALQVLVGGEALPNALMHALLESGCTVTNLYGPTETTIWSAAQPLAKGHTGAPPIGTPIWNTRVYVLDAALQPVPPGIAGELYIAGEGLARGYYNRPDLTAERFIGDPYGPAGARMYRTGDLVRWREDGSLDYISRADHQIKIRGFRIELGEIESVLSKYPGISQAAVIVREDQPGDKRLAAYAVADQPLDIGGLREYMGESLPDYMVPGAFVQLEELPLTPNKKLDRSALPAPDFSAVLSDRGPRTPQEEILCDLFAEVLGLARVGIDDGFFELGGHSLLAGRLMSRVRETMGAELGIGRLFDTPTVAGLAAQLDTAKSARPKLKPFDRPEHIPLSFAQLRLWFLYCLEGPSPTYNIPVIVRMSGKLDQSALKHAFYDVVSRHESLRTVFPENKGSSHQLILSAEEARPVFTVTRADKNELQDMLAAAARYRFDLAKEPAVRAELFDLGDGEYTLMILLHHIAGDGWSLNPLMRDLSIAYIARQTGEKAEWAPLAVQYADYALWQQQLLGSASDSESLIARQLDFWKKTLENVPDQLELPSDFPRPAESSYRGGVIPVNIGQELHARLLSLARNQRVSLFMVLQSGLSALLTRLGAGTDIPIGSPIAGRSDDALGDLVGMFINTLVLRTDTSGDPSFCELLERVREMNLAAYEHQDVPFERLVEELNPVRSRSRHPLFQVMLAFQNTPDPVLSLPDMETSLQISSVGSSKFDLTLELAEQRHDDGTPAGIEGLLEFSTDLFRKETAEALAGRLLLLLEDAASHPDKPIGSLTILSDEERRKLLPVKRAKQHIQPRQTLPELFEIQAAAKSDETAAVFGESGLTYKELNERANQLAHMMIARGVGPEQFVALALPRSLDMIVGLLAVLKTGAAYLPLDPDYPADRIAFMLHDAKPVFMLTNREGASKLSIESGMPAFILDDPQNKETLERYAVTNPADADRIRPLSPLHPAYVIYTSGSTGVPKGVIIPHSNVIRLFESTRHWYHFHSDDVWTMFHSYAFDFSVWEMWGPLLHGGRLVVVPHDISRSPEAFLHLLVKERVTVLNQTPSAFYQLMHAEKEHKELGRQLALRYIIFGGEALELSRLEDWYSRHADNQPVLVNMYGITETTVHVSYLELDKNIAELRANSLIGCGIPDLNVYVLDDRLEPVPPGITGEMYVAGGGVARGYLGRQSLTAERFVADPYGPPGTRMYRTGDLARLRTDGSLDYMGRADHQIKIRGFRIELGEIEAVLVKHPDVEDAAVVVREDRPGDKRLAAYLVRSAGSTLDTGNMRRFAEESLPDYMIPSAFVQMNELPLTPNGKLDRKALPAPDFQTEVTGRGPRTPQEEMLCELFAEVLHLPRVGIDDRFFDLGGHSLLAVHLMGRIREAMGAELSIGTLFEAPTVASLAERLESGTGASALDVLLPLRTAGEETPLFCVHPAGGLSWCYAGLMSSLEADYPIYGLQARGIGKKESLPQSLDDMAADYIEKIRTVQPKGPYRLLGWSLGGNVIQAMATQLQSRGEEVSLLVMLDAYPNHFLPIKNAPDDEEAVIALLALGGYDPDSLGDQPLDFDAALTILRREGSALASLDESVMMNLKDTYINSVGLLGTYKPKPFHGDVLFFRSTIIPEWFDPIEPDTWKPYITGKIERYDLDCRHKDMCQPGPLADIGAILAEKLNGRRTVR

SEQ ID NO: 109 - protein, 71 aa, Bacillus velezensis
MTNPFEREDGSYHVLVNAEGQYSLWPAYLDVPDGWETRLTNETRPVCLEYIETNWRDMRPESLKQAEAAKM

SEQ ID NO: 110 - protein, 225 aa, Bacillus velezensis
MAVQHYGVLKGTVSDMKRETDDDSPHFQVEVLGEPDTRYRCAINVMSSSKESEVLYAARDHFDASAITLLPNIPYGYTPIDETSRELALDYVRGGLFDPRNMVPLPHEVTGPDNDLNDFIETYMQKAKSEKATVYIYGSKFGPEPGADKIFGFKPTNGMHNIHMNQGNPIDTRWKKDNGTWHDGGILIQFADQWAAVFLAFLSQSWCTNEEGHPYTFCDHTQLNG

SEQ ID NO: 111 - protein, 376 aa, Bacillus velezensis
MIIGVPKEIKNNENRVALTPGGVSQLIGNGHRVLVESGAGLGSGFTNEDYVSAGAEILEDRKQVWDAEMVMKVKEPLAEEYAYFRQGLVLFTYLHLAAEPELAKALTEKGVTAIAYETVTDGRSLPLLTPMSEVAGRMAAQIGAQFLEKPKGGKGILLAGVPGVSRGKVTIIGGGGVGTNAAKMAVGLGADVTMIDLNADRLRQLDDIFGHQIKTLMSNPVNIADSVAEADLLICAVLIPGAKAPTLVTEEMVKQMKPGSVIVDVAIDQGGIVETVDHITTHDNPTYEKHGVVHYAVANMPGAVPRTSTLALTNVTVPYALQIANKGAAQAIADSPALKAGLNTANGHVTYEAVAKDLGYDYVPAEKAMQGSAAKA

SEQ ID NO: 112 - DNA, 20 bp, Artificial sequence
  Synthetic sequence
agagtttgatcctggctcag

SEQ ID NO: 113 - DNA, 17 bp, Artificial sequence
  Synthetic sequence
attaccgcggctgctgg

SEQ ID NO: 114 - DNA, 18 bp, Artificial sequence
  Synthetic sequence
caagtgccgttcaaatag

SEQ ID NO: 115 - DNA, 18 bp, Artificial sequence
  Synthetic sequence
ctctaggattgtcagagg

SEQ ID NO: 116 - DNA, 24 bp, Artificial sequence
  Synthetic sequence
gccaaccattgctaaattggcgca

SEQ ID NO: 117 - DNA, 24 bp, Artificial sequence
  Synthetic sequence
ggtagaaattcccagcgggtactg

SEQ ID NO: 118 - DNA, 23 bp, Artificial sequence
  Synthetic sequence
acgcgctaccaaaaggcaaagag

SEQ ID NO: 119 - DNA, 25 bp, Artificial sequence
  Synthetic sequence
gatctgcggttgtcctgaagattgg
